(19) United States
(12) Patent Application Publication
(10) Pub. No.: US 2004/0023230 A1
(43) Pub. Date: Feb. 5, 2004

(54) Method and nucleic acids for pharmacogenomic methylation analysis

(76) Inventors: Alexander Olek, Berlin (DE); Christian Piepenbrock, Berlin (DE); Kurt Berlin, Stahnsdorf (DE)

Correspondence Address: DAVIDSON, DAVIDSON & KAPPEL, LLC, 485 SEVENTH AVENUE, 14TH FLOOR, NEW YORK, NY, 10018, US

(21) Appl. No.: 10/257,166

(22) PCT Filed: Jun. 29, 2001
(86) PCT No.: PCT/EP01/07470

(51) Int. Cl. C12Q 1/68; C07H 21/04

(52) U.S. Cl. 435/6; 435/69.1; 435/320.1; 435/325; 536/23.2

(57) ABSTRACT

The present invention relates to the chemically modified genomic sequences of genes associated with pharmacogenomics, to oligonucleotides and/or PNA-oligomers for detecting the cytosine methylation state of genes associated with pharmacogenomics which are directed against the sequence, as well as to a method for ascertaining genetic and/or epigenetic parameters of genes associated with pharmacogenomics.

[0001] 1. Field of the Invention

[0002] The levels of observation that have been well studied by the methodological developments of recent years in molecular biology, are the genes themselves, the translation of these genes into RNA, and the resulting proteins. The question of which gene is switched on at which point in the course of the development of an individual, and how the activation and inhibition of specific genes in specific cells and tissues are controlled is correlatable to the degree and character of the methylation of the genes or of the genome. In this respect, pathogenic conditions may manifest themselves in a changed methylation pattern of individual genes or of the genome.

[0003] The present invention relates to nucleic acids, oligonucleotides, PNA-oligomers and to a method for the analysis of genetic and/or epigenetic parameters of genes associated with pharmacogenomics and, in particular, with the methylation status thereof.

[0004] 2. Prior Art

[0005] 5-methylcytosine is the most frequent covalent base modification in the DNA of eukaryotic cells. It plays a role, for example, in the regulation of the transcription, in genetic imprinting, and in tumorigenesis.

[0006] Therefore, the identification of 5-methylcytosine as a component of genetic information is of considerable interest. However, 5-methylcytosine positions cannot be identified by sequencing since 5-methylcytosine has the same base pairing behavior as cytosine. Moreover, the epigenetic information carried by 5-methylcytosine is completely lost during PCR amplification.

[0007] A relatively new and currently the most frequently used method for analyzing DNA for 5-methylcytosine is based upon the specific reaction of bisulfite with cytosine which, upon subsequent alkaline hydrolysis, is converted to uracil which corresponds to thymidine in its base pairing behavior. However, 5-methylcytosine remains unmodified under these conditions. Consequently, the original DNA is converted in such a manner that methylcytosine, which originally could not be distinguished from cytosine by its hybridization behavior, can now be detected as the only remaining cytosine using “normal” molecular biological techniques, for example, by amplification and hybridization or sequencing. All of these techniques are based on base pairing which can now be fully exploited. In terms of sensitivity, the prior art is defined by a method which encloses the DNA to be analyzed in an agarose matrix, thus preventing the diffusion and renaturation of the DNA (bisulfite only reacts with single-stranded DNA), and which replaces all precipitation and purification steps with fast dialysis (Olek A, Oswald J, Walter J. A modified and improved method for bisulphite based cytosine methylation analysis. Nucleic Acids Res. Dec. 15, 1996;24(24):5064-6). Using this method, it is possible to analyze individual cells, which illustrates the potential of the method. However, currently only individual regions of a length of up to approximately 3000 base pairs are analyzed, a global analysis of cells for thousands of possible methylation events is not possible. However, this method cannot reliably analyze very small fragments from small sample quantities either. These are lost through the matrix in spite of the diffusion protection.

[0008] An overview of the further known methods of detecting 5-methylcytosine may be gathered from the following review article: Rein, T., DePamphilis, M. L., Zorbas, H., Nucleic Acids Res. 1998, 26, 2255.

[0009] To date, barring few exceptions (e.g., Zeschnigk M, Lich C, Buiting K, Doerfler W, Horsthemke B. A single-tube PCR test for the diagnosis of Angelman and Prader-Willi syndrome based on allelic methylation differences at the SNRPN locus. Eur J Hum Genet. 1997 March-April;5(2):94-8) the bisulfite technique is only used in research. Always, however, short, specific fragments of a known gene are amplified subsequent to a bisulfite treatment and either completely sequenced (Olek A, Walter J. The pre-implantation ontogeny of the H19 methylation imprint. Nat Genet. 1997 November;17(3):275-6) or individual cytosine positions are detected by a primer extension reaction (Gonzalgo M L, Jones Pa. Rapid quantitation of methylation differences at specific sites using methylation-sensitive single nucleotide primer extension (Ms-SNuPE). Nucleic Acids Res. Jun. 15, 1997;25(12):2529-31, WO 95/00669) or by enzymatic digestion (Xiong Z, Laird P W. COBRA: a sensitive and quantitative DNA methylation assay. Nucleic Acids Res. Jun. 15, 1997;25(12):2532-4). In addition, detection by hybridization has also been described (Olek et al., WO 99/28498).

[0010] Further publications dealing with the use of the bisulfite technique for methylation detection in individual genes are: Grigg G, Clark S. Sequencing 5-methylcytosine residues in genomic DNA. Bioessays. 1994 June;16(6):431-6, 431; Zeschnigk M, Schmitz B, Dittrich B, Buiting K, Horsthemke B, Doerfler W. Imprinted segments in the human genome: different DNA methylation patterns in the Prader-Willi/Angelman syndrome region as determined by the genomic sequencing method. Hum Mol Genet. 1997 March;6(3):387-95; Feil R, Charlton J, Bird A P, Walter J, Reik W. Methylation analysis on individual chromosomes: improved protocol for bisulphite genomic sequencing. Nucleic Acids Res. Feb. 25, 1994;22(4):695-6; Martin V, Ribieras S, Song-Wang X, R10 M C, Dante R. Genomic sequencing indicates a correlation between DNA hypomethylation in the 5′ region of the pS2 gene and its expression in human breast cancer cell lines. Gene. May 19, 1995;157(1-2):261-4; WO 97/46705, WO 95/15373 and WO 97/45560.

[0011] An overview of the Prior art in oligomer array manufacturing can be gathered from a special edition of Nature Genetics (Nature Genetics Supplement, Volume 21, January 1999), published in January 1999, and from the literature cited therein.

[0012] Fluorescently labeled probes are often used for the scanning of immobilized DNA arrays. The simple attachment of Cy3 and Cy5 dyes to the 5′-OH of the specific probe are particularly suitable for fluorescence labels. The detection of the fluorescence of the hybridized probes may be carried out, for example via a confocal microscope. Cy3 and Cy5 dyes, besides many others, are commercially available.

[0013] Matrix Assisted Laser Desorption Ionization Mass Spectrometry (MALDI-TOF) is a very efficient development for the analysis of biomolecules (Karas M, Hillenkamp F. Laser desorption ionization of proteins with molecular masses exceeding 10,000 daltons. Anal Chem. Oct. 15, 1988;60(20):2299-301). An analyte is embedded in a light-absorbing matrix. The matrix is evaporated by a short laser pulse thus transporting the analyte molecule into the vapor phase in an unfragmented manner. The analyte is ionized by collisions with matrix molecules. An applied voltage accelerates the ions into a field-free flight tube. Due to their different masses, the ions are accelerated at different rates. Smaller ions reach the detector sooner than bigger ones.

[0014] MALDI-TOF spectrometry is excellently suited to the analysis of peptides and proteins. The analysis of nucleic acids is somewhat more difficult (Gut I G, Beck S. DNA and Matrix Assisted Laser Desorption Ionization Mass Spectrometry. Current Innovations and Future Trends. 1995, 1; 147-57). The sensitivity to nucleic acids is approximately 100 times worse than to peptides and decreases disproportionally with increasing fragment size. For nucleic acids having a multiply negatively charged backbone, the ionization process via the matrix is considerably less efficient. In MALDI-TOF spectrometry, the selection of the matrix plays an eminently important role. For the desorption of peptides, several very efficient matrixes have been found which produce a very fine crystallization. There are now several responsive matrixes for DNA, however, the difference in sensitivity has not been reduced. The difference in sensitivity can be reduced by chemically modifying the DNA in such a manner that it becomes more similar to a peptide. Phosphorothioate nucleic acids in which the usual phosphates of the backbone are substituted with thiophosphates can be converted into a charge-neutral DNA using simple alkylation chemistry (Gut IG, Beck S. A procedure for selective DNA alkylation and detection by mass spectrometry. Nucleic Acids Res. Apr. 25, 1995;23(8):1367-73). The coupling of a charge tag to this modified DNA results in an increase in sensitivity to the same level as that found for peptides. A further advantage of charge tagging is the increased stability of the analysis against impurities which make the detection of unmodified substrates considerably more difficult.

[0015] Pharmacogenomics is the science of utilising human genetic variation to optimise patient treatment and drug design and discovery. An individual's genetic make up affects each stage of drug response: absorption, metabolism, transport to the target molecule, structure of the intended and/or unintended target molecules, degradation and excretion.

[0016] Pharmacogenomics provides the basis for a new generation of personalized pharmaceuticals, the targeting of drug therapies to genetic subpopulations. Currently drugs are developed to benefit the widest possible populations. However the variations in drug reactions attributed to genetic variation are increasingly been taken into account when developing new drugs. There are multiple benefits to such an approach to drug design. The development of genetic tests may reduce the need for the standard trial and error method of drug prescription. Targeted prescriptions would further reduce the incidence of adverse drug reactions, which are estimated to be the fifth ranking cause of death in the United States. Furthermore, dosage decisions can be made on a more informed basis than currently used parameters such as age, sex and weight. Drug discovery and approval processes will likely be speeded up by the specific genetic targeting of candidate drugs. Moreover, this may allow the revival of previously failed candidate drugs. Overall it is expected that the development of personalized pharmaceuticals will reduce the costs of healthcare.

[0017] Several candidate genes have been identified that influence drug reactions, most notably the cytochrome P450 family. The cytochrome P450 monooxygenase system is responsible for a large proportion of drug metabolism in the body, furthermore it is also responsible for the activation of procarcinogens and promutagens. In particular, the CYP2D6, 3A4/3A5, 1A2, 2E1, 2C9, and 2C19 genes have been identified as key regulators of drug response. For example, homozygozity for the CYP2D6 null allele has a frequency of 1% to 2% in Asians, 5% in African Americans, and 6% to 10% in Caucasian populations. This genotype exhibits reduced degradation and excretion of many drugs including debrisoquine, metaprolol, nortrptyline and propafone. Another important member of the family is the CYP2C9 gene. It metabolizes a variety of important drugs, including ibuprofen, naproxen, piroxicam, tetrahydrocannabinol, phenytoin, tolbutamide, and S-warfarin. Substitutions in codons 144 and 359 result in a 5-fold decline in metabolic activity. Although the frequency of such mutations is unknown it has been estimated at 25% heterozygosity in the caucasian population.

[0018] A particular target in pharmacogenomics is the characterisation of single nucleotide polymorphisms and their effects on drug response. For example, response to the drugs pravastatin (treatment of high cholesterol), Clozapine (schizophrenia treatment) and procainamide (heart arrythymia) have all been shown to be affected by SNPs.

[0019] The benefits of pharmacogenetically developed drugs are of particular interest in diseases such as cancer, where efficacy and side effects show wide variation. Furthermore, the genetic basis of diseases such as cancer makes them appropriate targets. The first commercially available drug targeted at a specific genotype was Herceptin, a humanized monoclonal antibody for the treatment of metastatic breast cancer. Herceptin is useful in the 25%-30% of breast cancer patients who over express the HER2 (human epidermal growth factor receptor 2) protein. Alternatively, pharmacogenomics is also used to screen patients who may have adverse reactions to drugs. For example, azathioprine and mercaptopurine are commonly used treatments for acute lymphoblastic leukaemia in children. However, patients deficient in thiopurine methyl transferase are unable to adequately metabolize mercaptopurine and are at risk of developing life threatening myelosuppression.

[0020] Genomic DNA is obtained from DNA of cell, tissue or other test samples using standard methods. This standard methodology is found in references such as Fritsch and Maniatis eds., Molecular Cloning: A Laboratory Manual, 1989.

### DESCRIPTION

[0021] The object of the present invention is to provide the chemically modified DNA of genes associated with pharmacogenomics, as well as oligonucleotides and/or PNA-oligomers for detecting cytosine methylations, as well as a method which is particularly suitable for the analysis of genetic and epigenetic parameters of genes associated with pharmacogenomics. The present invention is based on the discovery that genetic and epigenetic parameters and, in particular, the cytosine methylation pattern of genes associated with pharmacogenomics are particularly suitable for the development and analysis of novel drugs and therapies.

[0022] This objective is achieved according to the present invention using a nucleic acid containing a sequence of at least 18 bases in length of the chemically pretreated DNA of genes associated with pharmacogenomics according to one of Seq. ID No.1 through Seq. ID No.174 and sequences complementary thereto and/or of a segment of the chemically pretreated DNA of genes associated with pharmacogenomics according to one of the sequences according to table 1. In the table, after the listed gene designations, the respective data bank numbers (accession numbers) are specified which define the appertaining gene sequences as unique. GenBank was used as the underlying data bank, which is located at internet address http://www.ncbi.nlm.nih.gov

[0023] The chemically modified nucleic acid could heretofore not be connected with the ascertainment of genetic and epigenetic parameters.

[0024] The object of the present invention is further achieved by an oligonucleotide or oligomer for detecting the cytosine methylation state in chemically pretreated DNA, containing at least one base sequence having a length of at least 13 nucleotides which hybridizes to a chemically pretreated DNA of genes associated with pharmacogenomics according to Seq. ID No.1 through Seq. ID No.174 and sequences complementary thereto and/or of a segment of the chemically pretreated DNA of genes associated with pharmacogenomics according to one of the sequences according to table 1. The oligomer probes according to the present invention constitute important and effective tools which, for the first time, make it possible to ascertain the genetic and epigenetic parameters of genes associated with pharmacogenomics. The base sequence of the oligomers preferably contains at least one CpG dinucleotide. The probes may also exist in the form of a PNA (peptide nucleic acid) which has particularly preferred pairing properties. Particularly preferred are oligonucleotides according to the present invention in which the cytosine of the CpG dinucleotide is the 5^{th}-9^{th} nucleotide from the 5′-end of the 13-mer; in the case of PNA-oligomers, it is preferred for the cytosine of the CpG dinucleotide to be the 4^{th}-6^{th} nucleotide from the 5′-end of the 9-mer.

[0025] The oligomers according to the present invention are normally used in so called “sets” which contain at least one oligomer for each of the CpG dinucleotides of the sequences of Seq. ID No.1 through Seq. ID No.174 and sequences complementary thereto and/or of a segment of the chemically pretreated DNA of genes associated with pharmacogenomics according to one of the sequences according to table 1. Preferred is a set which contains at least one oligomer for each of the CpG dinucleotides from one of Seq. ID No. 1 through Seq. ID No.174 and sequences complementary thereto and/or of a segment of the chemically pretreated DNA of genes associated with pharmacogenomics according to one of the sequences according to table 1.

[0026] Moreover, the present invention makes available a set of at least two oligonucleotides which can be used as so-called “primer oligonucleotides” for amplifying DNA sequences of one of Seq. ID No.1 through Seq. ID No.174 and sequences complementary thereto and/or of a segment of the chemically pretreated DNA of genes associated with pharmacogenomics according to one of the sequences according to table 1, or segments thereof.

[0027] In the case of the sets of oligonucleotides according to the present invention, it is preferred that at least one oligonucleotide is bound to a solid phase. Furthermore, it is preferred that all the oligonucleotides of a set are bound to a solid phase.

[0028] The present invention moreover relates to a set of at least 10 n (oligonucleotides and/or PNA-oligomers) used for detecting the cytosine methylation state in chemically pretreated genomic DNA (Seq. ID No.1 through Seq. ID No.174 and sequences complementary thereto and/or of a segment of the chemically pretreated DNA of genes associated with pharmacogenomics according to one of the sequences according to table 1). These probes enable the determination of genetic and epigenetic parameters of genes associated with pharmacogenomics. The set of oligomers may also be used for detecting single nucleotide polymorphisms (SNPs) in the chemically pretreated DNA of genes associated with pharmacogenomics according to one of Seq. ID No.1 through Seq. ID No.174 and sequences complementary thereto and/or of a segment of the chemically pretreated DNA of genes associated with pharmacogenomics according to one of the sequences according to table 1.

[0029] According to the present invention, it is preferred that an arrangement of different oligonucleotides and/or PNA-oligomers (a so-called “array”) made available by the present invention is present in a manner that it is likewise bound to a solid phase. This array of different oligonucleotide- and/or PNA-oligomer sequences can be characterized in that it is arranged on the solid phase in the form of a rectangular or hexagonal lattice. The solid phase surface is preferably composed of silicon, glass, polystyrene, aluminium, steel, iron, copper, nickel, silver, or gold. However, nitrocellulose as well as plastics such as nylon which can exist in the form of pellets or also as resin matrices are possible as well.

[0030] Therefore, a further subject matter of the present invention is a method for manufacturing an array fixed to a carrier material for analysis in connection with diseases associated with pharmacogenomics in which method at least one oligomer according to the present invention is coupled to a solid phase. Methods for manufacturing such arrays are known, for example, from U.S. Pat. No. 5,744,305 by means of solid-phase chemistry and photolabile protecting groups.

[0031] A further subject matter of the present invention relates to a DNA chip for the analysis of genetic and epigenetic parameters of genes associated with pharmacogenomics which contains at least one nucleic acid according to the present invention. DNA chips are known, for example, for U.S. Pat. No. 5,837,832.

[0032] Moreover, a subject matter of the present invention is a kit which may be composed, for example, of a bisulfite-containing reagent, a set of primer oligonucleotides containing at least two oligonucleotides whose sequences in each case correspond or are complementary to an 18 base long segment of the base sequences specified in the appendix (Seq. ID No. 1 through Seq. ID No.174 and sequences complementary thereto and/or of a segment of the chemically pretreated DNA of genes associated with pharmacogenomics according to one of the sequences according to table 1), oligonucleotides and/or PNA-oligomers as well as instructions for carrying out and evaluating the described method. However, a kit along the lines of the present invention can also contain only part of the aforementioned components.

[0033] The present invention also makes available a method for ascertaining genetic and/or epigenetic parameters of genes associated with pharmacogenomics by analyzing cytosine methylations and single nucleotide polymorphisms, including the following steps:

[0034] In the first step of the method, a genomic DNA sample is chemically treated in such a manner that cytosine bases which are unmethylated at the 5′-position are converted to uracil, thymine, or another base which is dissimilar to cytosine in terms of hybridization behavior. This will be understood as ‘chemical pretreatment’ hereinafter.

[0035] The genomic DNA to be analyzed is preferably obtained form usual sources of DNA such as cells or cell components, for example, cell lines, biopsies, blood, sputum, stool, urine, cerebral-spinal fluid, tissue embedded in paraffin such as tissue from eyes, intestine, kidney, brain, heart, prostate, lung, breast or liver, histologic object slides, or combinations thereof.

[0036] The above described treatment of genomic DNA is preferably carried out with bisulfite (hydrogen sulfite, disulfite) and subsequent alkaline hydrolysis which results in a conversion of non-methylated cytosine nucleobases to uracil or to another base which is dissimilar to cytosine in terms of base pairing behavior.

[0037] Fragments of the chemically pretreated DNA are amplified, using sets of primer oligonucleotides according to the present invention, and a, preferably heat-stable polymerase. Because of statistical and practical considerations, preferably more than ten different fragments having a length of 100-2000 base pairs are amplified. The amplification of several DNA segments can be carried out simultaneously in one and the same reaction vessel. Usually, the amplification is carried out by means of a polymerase chain reaction (PCR).

[0038] In a preferred embodiment of the method, the set of primer oligonucleotides includes at least two olignonucleotides whose sequences are each reverse complementary or identical to an at least 18 base-pair long segment of the base sequences specified in the appendix (Seq. ID No 0.1 through Seq. ID No.174 and sequences complementary thereto and/or of a segment of the chemically pretreated DNA of genes associated with pharmacogenomics according to one of the sequences according to table 1). The primer oligonucleotides are preferably characterized in that they do not contain any CpG dinucleotides.

[0039] According to the present invention, it is preferred that at least one primer oligonucleotide is bonded to a solid phase during amplification. The different oligonucleotide and/or PNA-oligomer sequences can be arranged on a plane solid phase in the form of a rectangular or hexagonal lattice, the solid phase surface preferably being composed of silicon, glass, polystyrene, aluminium, steel, iron, copper, nickel, silver, or gold, it being possible for other materials such as nitrocellulose or plastics to be used as well.

[0040] The fragments obtained by means of the amplification can carry a directly or indirectly detectable label. Preferred are labels in the form of fluorescence labels, radionuclides, or detachable molecule fragments having a typical mass which can be detected in a mass spectrometer, it being preferred that the fragments that are produced have a single positive or negative net charge for better detectability in the mass spectrometer. The detection may be carried out and visualized by means of matrix assisted laser desorption/ionization mass spectrometry (MALDI) or using electron spray mass spectrometry (ESI).

[0041] The amplificates obtained in the second step of the method are subsequently hybridized to an array or a set of oligonucleotides and/or PNA probes. In this context, the hybridization takes place in the manner described in the following. The set of probes used during the hybridization is preferably composed of at least 10 oligonucleotides or PNA-oligomers. In the process, the amplificates serve as probes which hybridize to oligonucleotides previously bonded to a solid phase. The non-hybridized fragments are subsequently removed. Said oligonucleotides contain at least one base sequence having a length of 13 nucleotides which is reverse complementary or identical to a segment of the base sequences specified in the appendix, the segment containing at least one CpG dinucleotide. The cytosine of the CpG dinucleotide is the 5^{th} to 9^{th} nucleotide from the 5′-end of the 13-mer. One oligonucleotide exists for each CpG dinucleotide. Said PNA-oligomers contain at least one base sequence having a length of 9 nucleotides which is reverse complementary or identical to a segment of the base sequences specified in the appendix, the segment containing at least one CpG dinucleotide. The cytosine of the CpG dinucleotide is the 4^{th} to 6^{th} nucleotide seen from the 5′-end of the 9-mer. One oligonucleotide exists for each CpG dinucleotide.

[0042] In the fourth step of the method, the non-hybridized amplificates are removed.

[0043] In the final step of the method, the hybridized amplificates are detected. In this context, it is preferred that labels attached to the amplificates are identifiable at each position of the solid phase at which an oligonucleotide sequence is located.

[0044] According to the present invention, it is preferred that the labels of the amplificates are fluorescence labels, radionuclides, or detachable molecule fragments having a typical mass which can be detected in a mass spectrometer. The mass spectrometer is preferred for the detection of the amplificates, fragments of the amplificates or of probes which are complementary to the amplificates, it being possible for the detection to be carried out and visualized by means of matrix assisted laser desorption/ionization mass spectrometry (MALDI) or using electron spray mass spectrometry (ESI).

[0045] The produced fragments may have a single positive or negative net charge for better detectability in the mass spectrometer. The aforementioned method is preferably used for ascertaining genetic and/or epigenetic parameters of genes associated with pharmacogenomics.

[0046] The oligomers according to the present invention or arrays thereof as well as a kit according to the present invention are intended to be used for the determination of genetic and/or epigenetic parameters of genes associated with pharmacogenomics by analyzing methylation patterns thereof. According to the present invention, the method is preferably used for the determination of genetic and/or epigenetic parameters of genes associated with pharmacogenomics.

[0047] The method according to the present invention is used, for example, for the diagnosis and/or therapy of solid tumours and cancer.

[0048] The nucleic acids according to the present invention of Seq. ID No.1 through Seq. ID No.174 and sequences complementary thereto and/or of a segment of the chemically pretreated DNA of genes associated with pharmacogenomics according to one of the sequences according to table 1 can be used for the determination of genetic and/or epigenetic parameters of genes associated with pharmacogenomics.

[0049] The present invention moreover relates to a method for manufacturing a diagnostic reagent and/or therapeutic agent for the diagnosis and/or therapy of diseases or of conditions associated with drug response by analyzing methylation patterns of genes associated with pharmacogenomics, the diagnostic agent and/or therapeutic agent being characterized in that at least one nucleic acid according to the present invention is used for manufacturing it, possibly together with suitable additives and auxiliary agents.

[0050] A further subject matter of the present invention relates to a diagnostic reagent and/or therapeutic agent for the diagnosis and/or therapy of diseases or of conditions associated with drug response by analyzing methylation patterns of genes associated with pharmacogenomics, the diagnostic agent and/or therapeutic agent containing at least one nucleic acid according to the present invention, possibly together with suitable additives and auxiliary agents.

[0051] The present invention moreover relates to the diagnosis and/or prognosis of events which are disadvantageous to patients or individuals in which important genetic and/or epigenetic parameters within genes associated with pharmacogenomics said parameters obtained by means of the present invention may be compared to another set of genetic and/or epigenetic parameters, the differences serving as the basis for a diagnosis and/or prognosis of events which are disadvantageous to patients or individuals.

[0052] In the context of the present invention, the term “pharmacogenonmics” encompasses the study of genetic variation underlying differential response to drugs, particularly genes involved in drug metabolism. The term further refers to the application of tools including, but not limited to, the functional genomics toolbox of differential gene expression (DGE), proteomics, yeast 2-hybrid (Y2H) analyses, tissue immuno- and histopathology, genotyping of SNPs and other polymorphisms, automated DNA sequencing, customised differential gene expression analysis, genostratification, and pharmacogenetic testing for variability in genes. Therefore, the application of modern genomic technologies, including SNPs, transcript profiling, and proteomics. SNPs may allow population “subgrouping^{t}” including the exclusion of patients who may have adverse responses to a drug or preselection of those who are most likely to benefit from a particular drug. They may also help in selection of clinical trial participants by providing better ways to determine whether a study group is truly heterogeneous or by allowing preselection of particular groups. Finally, pharmacogenomics involves the creation of individualized medicines based upon scientific and clinical data generated from a patient's genetic information. There are two applications of pharmacogenomics that may use similar techniques but are quite distinct: a) susceptibility gene identification and b) “right medicine for right patient” [Allen D. Roses “Pharmacogenetics and pharmacogenomics in the discovery and development of medicines ”Pharmacogenetique et Pharmacogenetique, Institut Pasteur, Paris [France], 12-13 Octobre 2000, Institut Pasteur]. In the present invention, pharmacogenomics is based on the differences in the methylation pattern between different copies of genes or genomes of individuals, e.g. patients.

[0053] In the context of the present invention the term “hybridization” is to be understood as a bond of an oligonucleotide to a completely complementary sequence along the lines of the Watson-Crick base pairings in the sample DNA, forming a duplex structure. To be understood by “stringent hybridization conditions” are those conditions in which a hybridization is carried out at 60° C. in 2.5×SSC buffer, followed by several washing steps at 37° C. in a low buffer concentration, and remains stable.

[0054] The term “functional variants” denotes all DNA sequences which are complementary to a DNA sequence, and which hybridize to the reference sequence under stringent conditions and have an activity similar to the corresponding polypeptide according to the present invention.

[0055] In the context of the present invention, “genetic parameters” are mutations and polymorphisms of genes associated with pharmacogenomics and sequences further required for their regulation. To be designated as mutations are, in particular, insertions, deletions, point mutations, inversions and polymorphisms and, particularly preferred, SNPs (single nucleotide polymorphisms).

[0056] In the context of the present invention, “epigenetic parameters” are, in particular, cytosine methylations and further chemical modifications of DNA bases of genes associated with pharmacogenomics and sequences further required for their regulation. Further epigenetic parameters include, for example, the acetylation of histones which, however, cannot be directly analyzed using the described method but which, in turn, correlates with the DNA methylation.

[0057] In the following, the present invention will be explained in greater detail on the basis of the sequences and examples with reference to the accompanying drawing without being limited thereto.

[0058] FIG. 1

[0059] FIG. 1 shows the hybridisation of fluorescent labelled amplificates to a surface bound olignonucleotide. Sample I being from a HT29 cell line cultured under standard conditions and sample II being from a HT29 cell line cultured under standard conditions with the addition of milrinone (1 μg/ml). Flourescence at a spot shows hybridisation of the amplificate to the olignonucleotide. Hybridisation to a CG olignonucleotide denotes methylation at the cytosine position being analysed, hybridisation to a TG olignonucleotide denotes no methylation at the cytosine position being analysed. It can be seen that Sample II had a higher degree of methylation than Sample I.

[0060] Seq. ID No. 1 trough Seq. ID No. 174

[0061] Sequences having odd sequence numbers (e.g., Seq. ID No. 1, 3, 5, . . . ) exhibit in each case sequences of the chemically pretreated genomic DNAs of different genes associated with pharmacogenomics. Sequences having even sequence numbers (e.g., Seq. ID No. 2, 4, 6, . . . ) exhibit in each case the sequences of the chemically pretreated genomic DNAs of genes associated with pharmacogenomics which are complementary to the preceding sequences (e.g., the complementary sequence to Seq. ID No. 1 is Seq. ID No.2, the complementary sequence to Seq. ID No.3 is Seq. ID No.4, etc.).

[0062] Seq. ID No. 175 trough Seq. ID No. 178

[0063] Seq. ID No. 1 trough Seq. ID No. 178 show sequences of oligonucleotides used in Example 1.

[0064] The following example relates to a fragment of a gene associated with pharmacogenomics, in this case, superoxide dismutase 1 in which a specific CG-position is analyzed for its methylation status.

### EXAMPLE 1

### Methylation Analysis of the Gene Superoxide Dismutase 1 Associated with Pharmacogenomics.

[0065] The following example relates to a fragment of the gene superoxide dismutase 1 in which a specific CG-position is to be analyzed for methylation.

[0066] Two samples of the cell line HT29 (human colon adenocarcinoma cell) were grown in culture. Sample 1 was cultured in a standard growth medium and Sample 2 was cultured an identical growth medium, with the addition of milrinone (1 μg/ml). The methylation status of the gene superoxide dismutase 1 was analysed in both samples.

[0067] In the first step, a genomic sequence is treated using bisulfite (hydrogen sulfite, disulfite) in such a manner that all cytosines which are not methylated at the 5-position of the base are modified in such a manner that a different base is substituted with regard to the base pairing behavior while the cytosines methylated at the 5-position remain unchanged.

[0068] If bisulfite solution is used for the reaction, then an addition takes place at the non-methylated cytosine bases. Moreover, a denaturating reagent or solvent as well as a radical interceptor must be present. A subsequent alkaline hydrolysis then gives rise to the conversion of non-methylated cytosine nucleobases to uracil. The chemically converted DNA is then used for the detection of methylated cytosines. In the second method step, the treated DNA sample is diluted with water or an aqueous solution. Preferably, the DNA is subsequently desulfonated at an alkaline pH value. In the third step of the method, the DNA sample is amplified in a polymerase chain reaction, preferably using a heat-resistant DNA polymerase. In the present case, cytosines of the gene superoxide dismutase 1 are analyzed. To this end, a defined fragment having a length of 451 bp is amplified with the specific primer oligonucleotides AGGGGAAGAAAAGGTAAGTT (Sequence ID 175) and CCCACTCTAACCCCAAACCA (Sequence ID No. 176). This amplificate serves as a sample which hybridizes to an oligonucleotide previously bonded to a solid phase, forming a duplex structure, for example TTTTGGGGCGTTTTAATT (Sequence ID No. 177), the cytosine to be detected being located at position 111 of the amplificate. The detection of the hybridization product is based on Cy3 and Cy5 fluorescently labelled primer oligonucleotides which have been used for the amplification. A hybridization reaction of the amplified DNA with the oligonucleotide takes place only if a methylated cytosine was present at this location in the bisulfite-treated DNA. Thus, the methylation status of the specific cytosine to be analyzed is inferred from the hybridization product.

[0069] In order to verify the methylation status of the position, a sample of the amplificate is further hybridized to another oligonucleotide previously bonded to a solid phase. Said olignonucleotide is identical to the oligonucleotide previously used to analyze the methylation status of the sample, with the exception of the position in question. At the position to be analysed said oligonucleotide comprises a thymine base as opposed to a cytosine base i.e TTTTGGGGTGTTTTAATT (Sequence ID No. 178). Therefore, the hybridisation reaction only takes place if an unmethylated cytosine was present at the position to be analysed.

### EXAMPLE 2

### Diagnosis of Diseases Associated with Pharmacogenomics

[0070] In order to relate the methylation patterns to one of the conditions associated with drug response, it is initially required to analyze the DNA methylation patterns of a group of affected and of a group of control patients. These analyses are carried out, for example, analogously to Example 1. The results obtained in this manner are stored in a database and the CpG dinucleotides which are methylated differently between the two groups are identified. This can be carried out by determining individual CpG methylation rates as can be done, for example, in a relatively imprecise manner, by sequencing or else, in a very precise manner, by a methylation-sensitive “primer extension reaction”. It is also possible for the entire methylation status to be analyzed simultaneously, and for the patterns to be compared, for example, by clustering analyses which can be carried out, for example, by a computer.

[0071] Subsequently, it is possible to allocate the examined patients to a specific therapy group and to treat these patients selectively with an individualized therapy.

TABLE 1
List of preferred genes associated with
pharmacogenomics according to the invention

| | |
|---|---|
| | Gen bank Entry No. |
| Gene | (http://www.ncbi.nlm.nih.gov) |
| ALDH6 | NM_000693 |
| CYP11A | NM_000781 |
| CYP11B1 | NM_000497 |
| CYP3A3 | NM_000776 & NM_017460 |
| DPYD | NM_000110 |
| EPHX2 | NM_001979 |
| OCLN | NM_002538 |
| TXNRD1 | NM_003330 |
| UGT8 | NM_003360 |
| MRP | NM_004996, NM_019900 |
| | NM_019901, NM_019902 |
| | NM_019862, NM_019898 & |
| | NM_019899 |

1. A nucleic acid comprising a sequence at least 18 bases in length of a segment of the chemically pretreated DNA of genes associated with pharmacogenomics according to one of the sequences taken from the group of Seq. ID No.1 to Seq. ID No.174 and sequences complementary thereto.

2. A nucleic acid comprising a sequence at least 18 base pairs in length of a segment of the chemically pretreated DNA of genes associated with pharmacogenomics according to one of the sequences of the genes ALDH6 (NM_{—}000693), CYP11A (NM_{—}000781), CYP11B1 (NM_{—}000497), CYP3A3 (NM_{—}000776 & NM_{—}017460), DPYD (NM_{—}000110), EPHX2 (NM_{—}001979), OCLN (NM_{—}002538), TXNRD1 (NM_{—}003330), UGTS (NM_{—}003360), MRP (NM_{—}004996, NM_{—}019900, NM_{—}019901, NM_{—}019902, NM_{—}019862, NM_{—}019898, NM019899) and sequences complementary thereto.

3. An oligomer, in particular an oligonucleotide or peptide nucleic acid (PNA)-oligomer, said oligomer comprising in each case at least one base sequence having a length of at least 9 nucleotides which hybridizes to or is identical to a chemically pretreated DNA of genes associated with pharmacogenomics according to one of the Seq ID Nos 1 to 174 according to claim 1 or to a chemically pretreated DNA of genes according to claim 2 and sequences complementary thereto.

4. The oligomer as recited in claim 3; wherein the base sequence includes at least one CpG dinucleotide.

5. The oligomer as recited in claim 3; characterized in that the cytosine of the CpG dinucleotide is located approximately in the middle third of the oligomer.

6. A set of oligomers, comprising at least two oligomers according to any of claims 3 to 5.

7. A set of oligomers as recited in claim 6, comprising oligomers for detecting the methylation state of all CpG dinucleotides within one of the sequences according to Seq. ID Nos. 1 through 174 according to claim 1 or a chemically pretreated DNA of genes according to claim 2, and sequences complementary thereto.

8. A set of at least two oligonucleotides as recited in claim 3, which can be used as primer oligonucleotides for the amplification of DNA sequences of one of Seq. ID 1 through Seq. ID 174 and sequences complementary thereto and/or sequences of a chemically pretreated DNA of genes according to claim 2, and sequences complementary thereto and segments thereof.

9. A set of oligonucleotides as recited in claim 8, characterized in that at least one oligonucleotide is bound to a solid phase.

10. Use of a set of oligomer probes comprising at least ten of the oligomers according to any of claims 6 through 9 for detecting the cytosine methylation state and/or single nucleotide polymorphisms (SNPs) in a chemically pretreated genomic DNA according to claim 1 or a chemically pretreated DNA of genes according to claim 2.

11. A method for manufacturing an arrangement of different oligomers (array) fixed to a carrier material for analyzing diseases associated with the methylation state of the CpG dinucleotides of one of the Seq. ID 1 through Seq. ID 174 and sequences complementary thereto and/or chemically pretreated DNA of genes according to claim 2, wherein at least one oligomer according to any of the claims 3 through 5 is coupled to a solid phase.

12. An arrangement of different oligomers (array) obtainable according to claim 11.

13. An array of different oligonucleotide- and/or PNA-oligomer sequences as recited in claim 12, characterized in that these are arranged on a plane solid phase in the form of a rectangular or hexagonal lattice.

14. The array as recited in any of the claims 12 or 13, characterized in that the solid phase surface is composed of silicon, glass, polystyrene, aluminium, steel, iron, copper, nickel, silver, or gold.

15. A DNA- and/or PNA-array for analyzing the methylation state of genes, comprising at least one nucleic acid according to one of the preceding claims.

16. A method for ascertaining genetic and/or epigenetic parameters for the diagnosis and/or therapy of existing diseases or the predisposition to specific diseases by analyzing cytosine methylations, characterized in that the following steps are carried out:
in a genomic DNA sample, cytosine bases which are unmethylated at the 5-position are converted, by chemical treatment, to uracil or another base which is dissimilar to cytosine in terms of hybridization behavior;
fragments of the chemically pretreated genomic DNA are amplified using sets of primer oligonucleotides according to claim 8 or 9 and a polymerase, the amplificates carrying a detectable label;
amplificates are hybridized to a set of oligonucleotides and/or PNA probes according to the claims 6 and 7, or else to an array according to one of the claims 12 through 15;
the hybridized amplificates are subsequently detected.

17. The method as recited in claim 16, characterized in that the chemical treatment is carried out by means of a solution of a bisulfite, hydrogen sulfite or disulfite.

18. The method as recited in one of the claims 16 or 17, characterized in that more than ten different fragments having a length of 100-2000 base pairs are amplified.

19. The method as recited in one of the claims 16 through 18, characterized in that the amplification of several DNA segments is carried out in one reaction vessel.

20. The method as recited in one of the claims 16 through 19, characterized in that the polymerase is a heat-resistant DNA polymerase.

21. The method as recited in claim 20, characterized in that the amplification is carried out by means of the polymerase chain reaction (PCR).

22. The method as recited in one of the claims 16 through 21, characterized in that the labels of the amplificates are fluorescence labels.

23. The method as recited in one of the claims 16 through 21, characterized in that the labels of the amplificates are radionuclides.

24. The method as recited in one of the claims 16 through 21, characterized in that the labels of the amplificates are detachable molecule fragments having a typical mass which are detected in a mass spectrometer.

25. The method as recited in one of the claims 16 through 21, characterized in that the amplificates or fragments of the amplificates are detected in the mass spectrometer.

26. The method as recited in one of the claims 24 and/or 25, characterized in that the produced fragments have a single positive or negative net charge for better detectability in the mass spectrometer.

27. The method as recited in one of the claims 24 through 26, characterized in that detection is carried out and visualized by means of matrix assisted laser desorption/ionization mass spectrometry (MALDI) or using electron spray mass spectrometry (ESI).

28. The method as recited in one of the claims 16 through 27, characterized in that the genomic DNA is obtained from cells or cellular components which contain DNA, sources of DNA comprising, for example, cell lines, biopsies, blood, lymphatic fluid, sputum, stool, urine, cerebral-spinal fluid, tissue embedded in paraffin such as tissue from eyes, intestine, kidney, brain, heart, prostate, lung, breast or liver, histologic object slides, and all possible combinations thereof.

29. A kit comprising a bisulfite (=disulfite, hydrogen sulfite) reagent as well as oligonucleotides and/or PNA-oligomers according to one of the claims 3 through 5.

30. The use of a nucleic acid according to claims 1 or 2, of an oligonucleotide or PNA-oligomer according to one of the claims 3 through 5, of a kit according to claim 29, of an array according to one of the claims 12 through 15, of a set of oligonucleotides according to one of claims 6 through 9 for the diagnosis of diseases.

31. The use of a nucleic acid according to claims 1 or 2, of an oligonucleotide or PNA-oligomer according to one of claims 3 through 5, of a kit according to claim 29, of an array according to one of the claims 12 through 15, of a set of oligonucleotides according to one of claims 6 through 9 for the therapy of diseases.

The application's sequence listing, which the Patent Office published only in electronic form, follows.

SEQUENCE LISTING (178 sequences)

SEQ ID NO: 1 - DNA, 17869 bp, Artificial Sequence
  chemically treated genomic DNA (Homo sapiens)
  unsure (14284, 14405)
tttataattttaatattttgggaggtcgaggcgggtggattatttgaggttaggagttttagattagtttggttaatatagtaagattttgttattatttaaaaaaaaaaaaaagaattgtaggcgcgtggtggtggtgaagagtttcgtgtgtaggttgtgtaggtggggtacgagttttagttagaaggttattttgttggcgcggtagttgttacgtacgcgtggttttaggtttatgtgtagatattgtttttttttgttgttgaatttgttttatattattttttcgaagcgattgggtttggtgtggatgaatttggtattttgcggtatcggttggttggggtttttgtgggtataggagggtagggaaaggaggagtgagggtaaggttttgaaggagggtggatggtagtgggtagggagatagatagagatgtagagagataggaggatagtaagaaagttagagaaaaagttatagaggtagagagatatagatggatatgaagagatagagaaattgtttgtttttttaggtaaataggtaaatagggatggagatagattggtagagatagttagaaatgcgggtagaggggtagggatatatatagagatagttagggagaagtagaagttgagtttgaatgaaatatagatagggttaaagatacgggagggatagttagagatagatatatagttaggttgaaattagtcggtagttagagaaagcgaaaagtaagtagataaaagagagtagtagagggaggtggagagttgttagtggatttttagagagatagagatagaagtagagatatataaatttttatatatatttagatatatatatttgagtagttagttagagatgtagagttttaggggggtcgggtaggggggattaggtaaggaggagggagagatagacgttaagttaaagttattgagtgggtttttaattttttagaaaggatagcggtttttttgtttgatattgttgagtttttaacgtttaatttcgtgtttggtatagaggtgtttgggttggttttattcgagtaagagggtaggttagagtgagtgttttaatagaggaacggcggttatgtgaaggagggagggtttcgtttagtttcgtttagtttttttggtttttatttagttttggcgaagttggtttagtaggttatgattacggtattgagtatgacgttatttttggagaagttataggggaagaggtcggtggtatttattatgggtacgttaaagatatagggtagtttattttcgtgcgtcgtatttgtttatttaggtcggtttttcgtttggtagtggtggtagaaggtgtaaaagtagacgggagattggtagtcggcgtgtagtttggtagtggttatagttggtgttatttattggtggttagtaaagagcgttagtagggttttgcggcgtatttcgttattgtttcggtcggtttagtttgtgtatataaatttgatggtttttcgaagtatatttttgtttttcgggtagttatataggttgtttataaagttggagatagtgaagttaaaggcgttggtagatatatcgttttcgttttttgtagagttttttacgaatttgaggttttttttttggttgacgtcgatgagtatgtcgtagttgaggaattttttttgttgtatgaggattttagggttatcggggattacgtcgttatttattacgggtttaaaggcgatgtggtagtggggagaaggggttagggttttattatttgtttattggtttttttttggtttgtggtttgttaagtttatacgtagatgtttttattttttataaattatttagttttaagtatgtttttattagtagtatgggaatggattaatatattttttaaaggttttattttttaatattattatatggggggttaggattttaatatatttattgtgattggataaaaaaaatttagtttattgtagaagttatttttaatttattatatgattttttttaatatttttttaaaaattttaagttttgggtggtagattaggttttttttatttttttaggaattgaggattggacggagttttggagatgtttgttgtaaaatgaaagagtagttttaagaatggttgaagttataatttatatgttttttggtataatgaaagtttttataaatggttggagaagttaaatttaagagatgaataaattatttttttatgttttttgtttttttttttatatgtgtgtgtgtttgtgtgtgtgtgtgtgtgtgatttagtttgtttataaggaggaaaaagaagatgaaatattatttgtcgattatttttaagttaaagggatagttttttttttgttgtatagttttggtatattataaaaacgtataattttgggtttagttttaaaatgtgtaattttggtttttaggtttttataaaagttattattttttttgtaaggaatagaagtagtttgatgaaattttttttttatatgtagtaatttttagaaatatgttattttataaaataagtttttagggtaggatgatgtttattttaaaaatataggttttaggttttgtggtttttaggtagaaaagatttgtttaagtgaggttagggttaaagaattatggatgtataaatgatatttagtaaatatttgttgaaattaaatgggtaggtgtggtaatttgtttttaaagtaattttttttgtttatatttaggaatgtttggtataaagggattgtttttatataattatttaataaaatataattgagaatgattatataagaagtgagatgataagttaagtatgttatgaagttttgagtttttatcgtttggatattaaataaattagtatttgaatttataaataattgtgattttgggagaagaaagtagtaaaatatagttgtttgggtatggggggagcgttatttttaagttatgtaatagttgttgtgtaattgtgtatttaatttaaaatatatttttgagagagaaaataattagattttttaaaaagaaagaaatagagaaatgttgaaagaatatagaagtttttatttggttattaaatataagatacgggggagttaaaggtattgggaatgatattgttttagaatttagggagttggttcgtgtattaaatttggtttgttttttgtttttttaaataaagttttataggaaaataattatatttattaatttatttattatttatagttttttttaaatagagttaagtaaattatattagaaattatttagtttagaggttgaaaatatttatagaaaaagttttgtaaatttttgttttagatgaataaaaagttatgtttaaatgtttgtaagggtgattatttattgagaaaattaaagtagttgatgtttgaatttatgtaggagtttttttgtggagaatagggtagaaatagtaaatagaaataagagtttaggtttgggagttagattggtttgaaatgaaattttggttttgtattaatagatttgtgattataagtaagttatttattttttgtatgtttttaaaatggggatatgaaatgagggtagaaagggaaataagtgttgtatttgatttgggtaaataatttagaaatttttagtttttttatgtaagttttatatttaggggaattggtaagttttattagaaaaaaaaaaattggttgattttttataattagagtatttagagtattttattttgtttttattgtaacgtttgttagagttataatataataaagtattgtatttaaaatgggagtaatattgtttaaaaaattgttttttagttaaatattaatttaagaatttgaattgtttggaagttttgtttaaatttagtttttgtatattgtttatgttgataaatatagataatttttaaaattaggattatttttattttaaatgagtattaatagatgatattgttatatttttaattgtggtgattgtgtgtgatagtgtgtttcgaattttttaaaagttttgttggtttttttgtttatatatagaaaataaagataatttagggtttttgagattatagtaggtttatttatttagtattgaaaatatataagattgatacgatattttaaaattaatttagggtagggtgtagataaagggttttttttttttaaatagtattttgattttttgggagatggattgattttttgaaagttttgttttgaagatatttggttagggttttttttttattagtttttattgagaataagtgtttttttagattttttttaatttttaaattttttgattttaagtttgttagagaatagaaagttatatagtagtattaaaaagtatgagaagttaaaaaaataataattggttttagtggttagagtagttgttgtatatatttattataggtttcggttttgtaaattaatttatttgtaaatagtgtattgtttttaggtataaattcgatgttggagtattggttttttaaggatttaagtttaaagttaaaggttttttgttttaggtgttataaataagtagtgtcgttttttttttttgttttgagtttgtttatttaatcgtattcgagtatgtaaataaattttagttcgtgtagataaaaaaggaataaataaagttaagtgttttattagaattaaattgttgagttagttatttgtgttttaggagtcgaattagaaatgttatttttaggtacgttagatttatttgttttatttatcgatttgaagatttaatatattaaggtgagtaaaatttttattttttgttttgattcgggtttgtaaaaattgtatttatgtaaagtattaaaggttaatttaagtaaatttgtgtaaagagttttttgtaaatataaaaataaaaggtatgtaaaatgtaggttttagtttagtgttttgattaaatatgatttaaattatattagataattttttataaatttattttttaaaatatttttaagcgaaaggaatttttttttgtgtgaaaggatttttatattaggatttagaggattttattaagtatttttattaattttattatagtcggtatgtatgataagagagtaaaatatttattagagaagtttattggaaagaattaaacgagtaggaataatagaaagtaaataaggagaaagagagtatattgaaataatataattttttaatatgtttaataaaatgagtgttaaaatagggggatttaagtttgataattggattcgaaaatttttagatggatttgtattattttgtatattttggtgggaggaagaaaagtattatttttttagttaagtttgttgttattggagtagatgtgtaattgttaattgataaatatttagagaaataagagtaggagttagatttagattttaaaattcgtagttggggggaattaggaaatggattttgtttgagtcgttttgagagtaattttgaattttgtttgttttatattgtttttttgttagattttagaattttaaaataaataaatgaataaaatataatttaattaaaattatttgaagttatttttatggtgtgatgtagaaagtatggtaagaaattaatttttgtaaattaagagagagttattttgttgtttgaattagttaatagaaaaataaagggtattataatttaatgataaagtaaaagtttttattgttatatatttatttttttatttgtaattatggatggttttgaaattttaaggtttgttgtatttttatttttataaagtataataaatgaggaagttgtttagttgattggtttttttttttaggaaagtagtagtagagattagattgtgtttttaatatggttgattagtagttatgaagtgtattttaaggtattgttattacgaggttttgttaaagaggaaagattttttttatttagttttattataaatggtagtatgaaaaatgtagtaaatttatatcgttaaataatttatatttggtaaaggtatgtttaaaaggttgtaagagtttagttttttttatttttttattttaagtttgttatttataagaaattttaattgaaagtgggtatatttaaaaatatattttatgaagtttaaaattgtcgataatgtttagattattgtattattattattaatgggattttttttttaataatattatttaggaagatattttggtagtttggatgtttttgtttttttatttttttggttttgtagaagtttgtaaagttttttttgtgtgtgtattttaaggaagttttaatgtaaataatttttttgttaaattaagttttatttagtagttattaattaagtatgtaagaagcggtattagataaatgagatggttttaaaaatttaatatataagtatagatttaatgaatttttaatatagagagatgattttgagattgaaatttatttatttcgaagttattgtgtaataatttttttttagggaaagtgattgatttaagtgtttaaaagaagggtagatttaagagtaggcgttttgttttgtgtttaagaatttttttggtaaaaatattttaaataagttagtgaattttgatttttcgtgtattttttatataaaatttgtttgtttaatagtattgttaaattaagttttatttagtagttattaattaagtatgtaagaagcggtattagataaatgagatggttttaaaaatttaatatataagtatagatttaatgaatttttaatatagagagatgattttgagattgaaatttatttatttcgaagttattgtgtaataatttttttttagggaaagtgattgatttaagtgtttaaaagaaggtaagatttaaagagtaggcgttttgttttgtgtttaagaatttttttgggtaaaaatattttaaataagttagtgaattttgatttttcgtgtattttttatataaatttgttttgtttagatagtattttattgtttaatttattggttatagcgtttttatatttgggaggacgttagttatgtatgtaattaaatttaaatgggtgaatttttttaaatgttttcgtattttttgtttattatgttttagtgaagaattggattgaatttgtttttgtaagaggagttaaaaaaaaaaatgatggttattaattataaaaagttttttggttataaattaagtaagtaaggagtttatagtgtttgaggaattattttttattattagttttaaagttttgtgttatttttttgttattattttaatgtttttttttattattattatagttagaagtatattggttgttaggataagttggagagaatagatagggttgagtaaaaaaaaaaatattataattacgatagaaaagttatatatttttaagtttgggattgttttttatttaaataaaagaatttattgatgtatatgtttttatgatttattttttagtatagtttgattatttttttgttggggtagattaaagagagattagagtttaagaaatgttttttaaaattatataaaagtttttggaatttaaaattttaaaaatatcgttataaatttattaatatgaatttatattttatttttatttttattatttttttttttaattttaaatgaattttatattttttattttattgagtttttaaatgaagagattttttgaaagttatgtgattattgggtaagttatattatttttttttgtttcggtttttttatgtttaaaatggggatgataaaggtacgtattttttaaggtcgatgaaagtattaaacgaatttaatgcgtataaagtttttgaaataatgtttggatatgggaaatgatttaacgttagtgattttagttttatttttttgaattttttttagtttttttagaatttttttttttatttaattttttttagatttgttttttataagtatgttttacgtttttttttagtttttttgttatttttttttgtatagttatgttttatttgataaagattgtattagagtgaagttttaagggttttttaagattttagggattaaaaatttttttttataggattcggtaattttgtttgttattttttttttataatattgttgttttattttttttttttttttttttttttttataaaaggaaataggaaatttaagaagataagtatttttagatagaatttaaacgttaaaatgtttaatttaattagtaagttttatttattaaattatggtttgtttatgttataaaagatttttattagttaatgatattttatttatatatatatatatatatatatatacgtatatatatatataataaataattataggtaaaatttattgtgtttattttgttatgattgtttaagtttttgataatgattttatttattttttataataattttatgaggaggttattatttttgttttatagtttagggaattgaggaatagagcggttatgtaatttattaaagttatatagtaagtaagtgataaagttatattgttaatgttggtagtttgagttaatatattagtaagagatttgtttaaggttaattttattattttgggatattgatttgttagaatttttttgtatttttttttattttgatttttatttgtttattgttgattattatggtttttttagttgttgtttagttgtttttaggttaataagagaaagtttgtagttaatttagaaaaagagaataatagggaaattgaaaggaaataggttttttgttttgattgaaaatgtgacgtttgggttaggagaggttatgaggtagaggattttgatatggatgtgaaatgtttgtgtgaattatatttttttaatttttatggaatcgattttggttagagtaggagattgtttttttagatttttggttttgtttaatttttttgggttaaagagatatttttaatggagaagagttatgaattattgaataatacgttttaggtacgatttgaagtgtttttttttttttatgattatttttttaaatttttataataaataaatttagttatatgaatttttaaatattttttttgttttttttgtttgttttttttttttgtttttcgttttttttatattttttttttttttatttaataaggttttgaatgagtgttttatgttagtttttatgatataagagggttaatatgatttacgttttatgtagtttttgtttttggaaggtgtgtggaatagtgtggggtagaaaataagagaatgttttaattagaaattaggataaatgtttaaagtaaaataattgaaagttgagaggatatgagtagaagagtttttgatgaggatttttgggaaggtgttttaaaggtaagtttgagggatgtagagaataaggtggttaagagtagggaagaataaagatttagaggttttattatatgtaaagatttcgaggataagagtatgttatgtttaaagaattatttaaaggttaatttggttggagtaaagtgaataagggagagaatggatgagatgaaattgaagtataggttggggttagatcggttggcggattttgaggaagattattgagaggtgtttaaaataggaaaggatttatgtttaacgtaaagttgattgtgttgtgatgttgtttttatttgggaaatgtttttaatttttttttaattgaagtaatattttgtttgttttgggtttggaagtaggtgaaaaaaatagttgattggttgtaaggtgtagtgattgaataagttaaatttggttttaatttttagttattttatgtatttaattatatgattttggttaagttttttattttttggagttttagtttttttgtttgtgaattgggaatgagaatgattattttggaaagtggttgtgagaattaagtgaggtaatttgtggaatgtggttggtatttattaattatttagttttttttttttttgatttttttttttaagatgatttttagaattatatgattattttgtttttaatgtaagttatatttatattgtttattatagtttaaaattgattttatatattttttttatttgaggtgtattattaattattgagaggagttagaaaagatgttagtagagttttattttaaagttgaggagttcgagtttagagattatgattgatttaaggttatatagtttttaaaatgtaaaagtagaataaattggattttaaatttttttattttggatttgatgtttttttatatgatatttttttttttttaaatattaaaattagtagtattagaattttatttaagaaaatttaattaagaaaaaaatttgaagtaaataatatatattttaagagaagagggtattattttttttttttaattagttttaataattgtttttatatttattattgtatttttattatttattttttattgtggttgaaagaatagatttaggttgaagtttgagattttgtgtttttaatagttttttagtttttgttgatgttattaaaatgtttgttgattagtagtaagggtttaaaagttttaggtgagtgagttttataattttaatgtagtaattattttttagttattttataatagagtttttagttttttttagaaattagtatttagttatattagaaattttttttttagaaagtgttagagttaagtagaaatatgatgatggttataaattagtgatagaattaattattgattttaatagtgggagataattatttattaatatttagaatgtttatttttgaggattgttgttttggtaagttgttttgttttttggtatttgtttgattgtaagaaaatggaattaataattttaaagtaaagaatatatgttttaagagagggtattgtttttattttataagggtttttagtataattttttatataattttgtaatagggattttaatttattgaatttgttattatatatttgttagaatgagggaaatatttttagagaatatgaaaaataatttatttgaagattaatttaaagtaaaggtaatgattttgaaatggtatggataatttataggatgatatgttgtaaattagtataaaataaattttatagaaatatagatattaaatagagatatttgaaaatagtaattatttggtttgggatggtggtgtgggggggtgtattttggtttgatttattatgatgttattataattatagttaggggatatattatatgtttataaagtgtaagtgataatatagaattatgtttaaaagaatttgagtaaggattgttttataaatttttatttagaatttaataaattagaaaagtaaatttgtgtaatattggtttttttgacgttgatatgttttgggtgtatagatgtatatagtaaaagtatttataaatttagaagtattgtttgagaaggatgtgaagtgttgttaatattgggttttttgatattatttttatttgatttattgtaacgtttgatttattaatggaaatttgtttattggggaatttgtataaattttatatttttaaaaattttgtttgaatcgtttttttttttaattttggttttatttttattgattatttttattgttttatcgatatttttttagatgttaaaggaatataaataattattgaattatgttttatatttggtatttttttagaaggaagagggtttatatgcgagtaattttattattaggttttgatattgttaaaaatgggtagaattttttatcgtttttatattttaattttgatatagaaaatatatgatgtatagaagttgttgataagttttgttattatttttaggatatagtgatggagtggtttaaaataaatgttgtggtattttttttttttttttgatataattgaaaaggttgatggggttttgtaaataataagaaaaaagagtatatatttatattattaaagttagattattatttaaagtaaatgaaaggaaaattttattttttttattttttgttttcgttattttgttattttgtttttatttatttgatgatagttaaaaattttttttttttttgttattttttttttaatttttttttatattttttaattttgagttttaatattttgtttttttgttttagggttagggtgtaaagtagttgttagagatttagttttgatttttttaaatgtttaatattttatttgatttttgtttagttttttttttttattatttattttcgattttatattttttgatttttagcggtttttagtattttggtaggtttttaagttgagaaaaggttgatatatttatagtatatattagtttttataggtttatattattatttatgtagtttatgttgtgatttagtttttaagtttgaaaatttatatggatgatattaaatggggatttttattattttttttttcgtttggaaaattttaaaagaaattttttgtgtattgaaaatgtgattttttaaaattttttttttattaagaaagtattgtttttttttatagattttagggttgttggtttagttgttgttttgtcgagataatattaatttaaggtattttgagtattttttgtaaggagttaggggttttttattttagtttatagattttaaaattttatattagtagataaggtaaatagggttttattttgttattagttaaaattagttttatttaagttagaaatattttgagaaaattatgtttatttatttagaattgtagatttatatataatatattaagatataataatttttattttggaaaggtaattttttttataattatgattaatttttggatattagttgaatttaggaaatggttatttgtttattaaaggtaaaatgatgtattttttaaaatgtggtatatttaaaatttgaagtgtaaaaatttatttttaagttgttttaatatttttattgattgtttttttatatagaaagtatttggagtttaagagtatgtataggtatttataatttttaattaatattttaaatagaaggttgatgtttattttatatatatattatttaaaagttatttaagtttaaaatttataattagaattgagttaatatataatggttatatagaatttaagaatattttatttttatagtattatttttttttttttaagttggttaaaggtaaaaaataaatggaaaataatattgttattattatagaatattaaataagtttaatgtaaattttataattattataataaatatttattagtttagatttttttatataattattaatataattataggaatagtgattatataaaaacgtttggttatatagttagttggaaggtaaatgtttaatgtaaagtttttataattaaaatagaaaaaaaatgtatttgaggtaggttttatgaataaattatttgtagttaaggggaagaaaaagattgggtaatatttggttttttaattatttaggttattatattatttatgttaaattttttttttatgttgaaacgtttttgtttgtgggagaatggtataatttataatttgtagattgtattgttatattatttttttttaaaagtttgtgattttatgataggattatgaaattagttttaaggttaattttttggattttggttggtttattttaaatttatttgggatattttaaaattagtatttttaaatatttatttgatttggtttttttttttttttatatttagaatatagtttaaatttttttttttggggattaggatttgttataaattgattttatttttaatgttaggttttatttgtgatttatgtttattgtaattttattttgttgggagttgttttgtttattgtgttataaatttttaaagatttgtttttttttttattttttttttttttttttttttattaatttagttttattttttaaagaagtatttttttagtttatgtttttttatattatttattgataatatcgttgttttggttattntgttttatagtttttaattttgtattggcggtttttgatatgaatatattttttttttagatataagtttttgagagtagagttatggttaatttattttttaattttttataataattgntagattatgttttaagtatttatttattattggataaatatttttttgataaagtaaaagttattaattatgattatataaatgttaatataagtttaaatataagttgggtttatagtgtttttttgttttaaaggttaaaattgaataatgtagaatagtgttggtaatttggggttttttatagttgatttttttagttgtttgtaggttgttagataaatatgtgttattattttaggttaatgtttatttataaaatatttattggttttaatttaaagtggtagttttatgtatagtttagatgtaaattttgattatggaattagatggtatatatatattgtaataatttttttataaaaaagtgtgtaaagagagtaaaataagttataatatattgagagtatattattgagaatttgaaattatagattattatagatttaaggataagaggattcgggcgagaattagaaagttcgattataggtttagtaaaatgtaattgattttgtatgttgttttattttatttttaatgaaattatattgtagaagggtgaaattttggatttttgttaaaatgaaatttgtgtttttttagtttataggtataaaatttaaggtggtaatataatttttaggtagagagaaggtagaatttttaagtgaataaatttgatgtaggttttgaaagattgatttaaaagtttacggtaggtatcgtaatatttttagttttttgtttggaattttatgggttgatatgtagatatttaatattaatataaagtagaatataagtaatttattagtaggatattaatatgttatgttggaaagaagaaaaaagagattaaatttaattggagtaattagttaaatttttatgaggagatgacgtagtaagttagaatttgaagtaaaaatagaagaaaatagtggaattttagtttaaagaatagtgtgaataaaagtatgttgtaaaaaatagtatggtgtttgaggtagtagaatgaggttggaataaagggtaaattgagggaatggtagagtaaaagattggaaaagtatgttggagtaagatcgtgaattatttttagtgttatgttaagtagtttgataatagaggattattaaagtattttgaggagggttgtagatagaatttgaggaagattatgatgataaggtgaaaattaaattttaattaggtagaggtagggggtaaagagaatagggaaagtttttttatatttgtatagaataaagtgatataaaagggtatttagggattatttgtgttattaatagaagaaggaaagtgtgtgagagatagggttgggggatagtgtgtatgagtaagttttagaattttggggtgagagtagtataaagttagagatgatagtgagttgagttcgggataagttgattaagtttttttttagttattttttgagaagaaaaatattaagttgtaagggtataaatggaaatattttaagaataattatgggattttgtaaaatgtatttttgatagttagagtgttgatttattttaagagatattgggtaaattagtattttcgtttgaatttatttttttttaagttgatttaagagtttagtgtttttttttaaaagataatataatgaattttatggtttttatttgtatttagttaattttgtttttgtaatttgatagggttttttgatattttttttattttttttatttttttatatatgtatttttgtatatttagtttttttatttgaatagttttgggttttttttttttttatttaggtatgtttatgtgttttattattaattttaggttagtattataatttttttgaatgtttttaattatataggataatttttttgtatggaaataatgttgtttttttgtatggaaaattatattggtatgaatgggtaaataagacggtttatttttttttttattttgtaggaaattataagtgttatagagtatttatttgtagaacgttatagattttatttatgagtagttgatggattatagatttttgatttaattaagttagttatttaagaattttttattgaggttaaaattgtttgagggttgttggatattgaagatagattggaaaattatatatagtttttgatggaaggtagatatttaaaaatgattatttaaaaagtgataaattgtttaatggaagtatagaggagattagggaagtatattttgtttaaataataaattatagaatatagaatgaattatatttaggtatttagggatatatagtaatatatattttattattttgatagaattttaagttatgttagtgattatcggggaatttttaataaataagtaatttgtatttagtatagtagttaatttaaattttggaggagtgttttattatattttttttcggggttgaattattaataatttatttttagatatttagtaagaagggatgtttgaattaggatatatgttataatttagtatatatgttatttttttttattttttgtgttagttatttttgatttaaaatagaataaattagtttattttgttataagtttaatagaaagttatatattatttaagattgtatttatgattgtttttatattttaaataattagaaatgtgaaagttggttttttaagaaaagataaatttagtgatatgaaagttgaaattgagatgttttaaatgatatattgatgtttttaagtatttttattttatagtatatatagataaaattttatattttttagtgtttattgtttttttagttgtatgtttattttttatagttattattaagaaattttgtttttgattttgtttgaagataacgaaattattaggtaattttttgaaaaggagaataaaattatatgtttttaaaaagttaatgaaataatgtgattagttaattttttttaagtgaattttttttagaattttttagtaaaattttttttttaattttaaaatattaaaggattagaaaatagttttttatgattttaaattattagtagtcgaaaatgaggatgtttagaatttaaagtggaaaatagaagtaattattaataaagattaagtttataaaagtttttgttttgttttaaatttatggttattttaggtaaaagtattgttttttagattgttttttttagtatgtattttttagtgttgaattgattgtatattttaaatttaaaagtattatgtattttattttagtatatgtttatgtatgtgaatataaaatgttttaaatagttagaaagttttgagaggtgaagagatgtgtattatttaggtatggtgaaatgttttagtttaagtttatgaaaatttttaaaattttttgtatatttaagcgttttgtatgtatttttttt

SEQ ID NO: 2 - DNA, 17869 bp, Artificial Sequence
  chemically treated genomic DNA (Homo sapiens)
  unsure (3465, 3586)
agagaaaatatatataaggcgtttaaatatgtagaaaattttggaagtttttataaatttaaattaaagtattttattatgtttaaatgatgtatatttttttattttttaaaattttttggttgtttgagatattttgtgtttatatgtatagatatgtattaaaatgaagtatataatgtttttaagtttaaggtatgtaattagtttaatattagaaaatatatattggagaaaataatttagaaaataatgtttttatttgaaatggttatgaatttgaggtaaagtaaaggtttttgtgggtttggtttttattaatgattgtttttattttttattttaaattttgaatatttttattttcggttattggtgatttggaattataagagattattttttaattttttaatgttttaaagttaaaaaaagaattttgttaaaggattttaaaaggagtttatttagagaaaattagttagttatattgttttattggttttttaaaagtatatggttttatttttttttttaaaagattatttggtaatttcgttgtttttagataaaattaggaataagattttttaatggtaattatgagaaatagatatgtaattaaagaaatagtaagtattaaaaaatatgaaattttgtttgtgtgtattataaaatagaaatatttaaaagtattagtatgttatttaaaatattttagttttaatttttatgttattgaatttgtttttttttgaggagttagtttttatatttttaattatttgaaatatgaaaataattataaatatagttttggatagtatataattttttgttagatttatgataagatggattagtttattttattttgaattagaggtagttaatatagggagtaaaggaaggtgatatatgtgttggattataatatatattttaatttagatatttttttttattggatatttaaagataagttattaatagtttaatttcgagggagaatgtaatgaaatatttttttaaggtttaaattagttattatgttaaatgtaaattatttatttattaaaaatttttcggtgattattagtatagtttaaaattttattagagtaataaaatgtatattattatatatttttaaatgtttgaatataatttattttatattttgtgatttattatttagataaaatatatttttttggttttttttatatttttattggataatttgttattttttaaatagttatttttaagtgtttgttttttattaagggttgtgtatggttttttagtttatttttagtgtttaatagtttttaagtaattttagttttagtaaaaaatttttgaataattaatttaattgaattaaagatttataatttattagttatttatggataagatttataacgttttgtaaatgaatattttatgatatttgtgattttttataaaatggggaagaggataagtcgttttgtttgtttatttatgttaatataattttttatataagaaaatagtattatttttatataagaaaattattttgtatagttagaagtatttaaaggaattgtagtattagtttgaaattgatggtaaaatatatgggtatgtttaaataaagggaaaaggggtttaaagttgtttagatgaagagattagatgtgtaaaaatatatatatggggaaatgagaaagatggaagaagtattaagaaattttattagattatagaaataagattaattgaatatagatgaagattataaaatttattgtattattttttgggaaaaaatattaggtttttagattaatttgaggaaaaataaatttagacgaaagtgttgatttgtttaatgttttttagagtgaattaatattttagttattagaaatatattttatagaattttataattatttttagagtgtttttatttatgtttttatagtttagtatttttttttttaagggatggttgggaaagaatttaattaatttgtttcgaatttagtttattgttatttttagttttatgttgtttttattttaaagttttgaagtttgtttatgtatattgttttttagttttattttttatatatttttttttttttgttaatgatataaataatttttaggtatttttttgtattattttgttttatataagtataaaaaagttttttttgttttttttgttttttatttttgtttaattaaaatttaatttttattttgttattataattttttttagattttgtttatagttttttttagaatattttagtgattttttattgttagattgtttaatatggtattggaggtggtttacgattttgttttaatatgtttttttagttttttgttttattatttttttagtttattttttgttttagttttattttattgttttaaatattatgttgttttttgtagtatgtttttatttatattgttttttagattagagttttattatttttttttatttttattttaaattttagtttattgcgttatttttttatgaagatttgattagttgttttaattgaatttaatttttttttttttttttttaatataatatgttagtattttattgataaattatttatgttttgttttgtgttaatgttagatatttatatattagtttataaaattttaaataaaaaattaaagatattgcgatatttgtcgtagatttttaaattagttttttaaaatttgtattagatttatttatttgggaattttgttttttttttgtttaaagattgtattattattttagattttgtatttgtaaattaagggaatatagattttattttggtagagatttagaattttatttttttataatgtaattttattaaaaataaaataaaataatatatagaattaattatattttgttaggtttgtggtcggattttttagttttcgttcgagtttttttatttttaggtttgtgataatttgtggttttaagtttttaataatatgtttttaatatattatagtttattttattttttttatatatttttttgtaaaagaattattatagtatgtatgtattatttagttttatgattagaatttgtatttaagttgtatataaaattgttattttagattaaagttagtgaatgttttgtaaatgagtattaatttgaagtaataatatatgtttatttggtagtttgtaggtaattgaagagattagttgtagaggattttaaattattagtattgttttgtattatttagttttaatttttaagataggaggatattgtgagtttaatttgtgtttgaatttgtgttgatatttatataattatgattagtaatttttgttttattagaaaagtgtttgtttaataatgagtaaatatttgagatatagtttgntagttattgtggaaaattgagagatgagttagttatggttttgtttttaggggtttatatttaagaggagaatgtatttatattaagagtcgttagtatagaattaaagattgtggagtanaatggttaaagtagcggtgttgttaataaatggtgtagaggggtataggttgaaagaatgtttttttgaaggatggaattggattggtggaaagaaggaaaaaaaaagagtaaagggagggataaatttttggaggtttgtaatatagtaaatagagtagtttttaatagaatggagttgtagtggatataagttatagataaggtttgatattgaaaataaagttaatttgtggtagattttgatttttagagaaagaagtttaggttgtattttggatataaaaagggagagagattagattaaatggatgtttaggaatattgattttaaagtattttaagtagatttgaagtagattaattagagtttaagaaattagttttgagattaattttataattttattataaggttataggtttttgaaggagagtgatgtaatagtgtagtttataaattatgaattatgttatttttttataaatagaggcgttttagtatgaaaagggaatttggtataggtaatgtgatgatttagatggttagaaggttaggtattgtttagttttttttttttttttagttatagataatttatttatagggtttattttaaatatattttttttttgttttaattataggagttttatattgggtatttgttttttagttaattgtgtgattaaacgtttttgtataattattgtttttatagttatattaatggttatatggagaagtttaggttaatgaatgtttgttataataattataaaatttatattaggtttgtttaatgttttataatggtgataatattattttttatttgttttttgtttttagttagtttagaggaaaagagatgatattataaaagtaaaatatttttgggttttatgtaattattatatattaatttaattttaattatgaattttggatttaggtgatttttgaataatatatatgtaaagtagatattaattttttgtttgaaatattgattggaaattataaatgtttatgtatatttttggattttaagtattttttatatggggaagtaattaatagaaatgttgaggtaatttagaaatggatttttatattttagattttagatatgttatattttaagaaatgtattattttatttttgataaataagtagttattttttggatttaattggtgtttaagaattagttataattgtgaaaaaaattgtttttttagagtaaaagttattatgttttaatgtattgtgtataaatttatagttttaaataaataagtataatttttttaaaatatttttggtttggataaagttagttttgattagtggtaaaataaagttttatttgttttatttgttgatatgagattttggagtttgtgggttaaagtggggagtttttgattttttgtaaaagatatttagagtgttttaaattaatattatttcggtagggtagtaattgggttagtagttttagagtttgtaaaggaaggtaatatttttttggtgggagagagattttaagagattatatttttaatgtataaagaattttttttaagattttttaaacgagagggagggtgatgagagtttttatttaatgttatttatgtgaatttttaaatttgagaattgagttatagtataggttgtatgggtggtggtgtgaatttgtggagattggtgtgtgttgtaaatgtgttaatttttttttagtttaggaatttattaaagtattaaaggtcgttgggagttagggagtatgagatcggagatgaataatgaggaggagagattgaataaaagttaggtggggtgttaaatatttaaaagaattaaagttggatttttggtaattgttttgtattttaattttgaggtaggaaagtaaaatgttgagatttaaagttagaaaatgtaaaaggaaattaaggaggaaataataaagggaaagaaaatttttaattgttattaaatgaatgaaaataaaatgatagaatgacgaaaataaaaaataggagaaataaaattttttttttatttgttttaaatgatagtttgattttagtaatgtgagtatatattttttttttttgttgtttgtaaaattttattagtttttttaattgtgttagggaaagagaaaagatgttatagtatttgttttgagttattttattattgtgttttagagatgataataaaatttgttagtaatttttgtatattatatattttttgtattagagttaagatgtagaagcgatagaaagttttgtttatttttagtagtattaagatttagtaatagaattgttcgtatgtaagtttttttttttttaaaagaatgttaaatataaagtataatttagtagttatttgtatttttttgatatttaaaaaagtatcgatagagtagtggaaatagttagtggaaatgggattagggttgggggagggaacggtttaggtaaagtttttagagatgtgagatttgtgtaaattttttagtgaataaatttttattagtaagttaaacgttataatgaattaggtagagataatattagaaaatttaatattagtaatattttatattttttttaagtaatgtttttaagtttgtggatatttttgttatatatatttatatatttaaaatatgttagcgttaggaaaattagtattatatagatttatttttttgatttattggattttaagtaagggtttgtgaagtaatttttgtttaaatttttttgaatatggttttatgttgttatttatattttgtaaatatataatatattttttggttatagttataatagtattatgataaattaaattaaagtgtatttttttatattattattttaagttagataattgttatttttagatatttttgtttgatgtttgtatttttgtgagatttattttatgttgatttgtaatatattattttatagattatttatgttattttagagttattatttttattttgggttggtttttaaatgagttattttttatattttttaagagtgttttttttattttggtaagtatgtagtgataaatttaataggttaaagtttttgttataaagttatataaagagttgtattgagagtttttatgaaatggggataatatttttttttaggatatgtgttttttattttagaattgttaattttatttttttatagttaggtaggtgttagaaaataaaataatttgttaagatagtagtttttagagatgagtattttaaatattagtaaatgattattttttattattaaaattaatgattggttttgttattggtttgtagttattattatgtttttgtttagttttggtattttttgaaaggaaagtttttgatgtggttgagtgttagtttttggaagaaattggaagttttattgtgaagtaattggaaggtggttgttgtattgaagttataaggtttatttatttaaaatttttagatttttgttgttggttaatagatattttggtagtattagtaaaagttgaaagattgttaagaatatagaattttagattttagtttagatttatttttttaattatagtaaggaatgaatgataaaaatgtagtaataggtgtgaaaatagttgttagagttaattgggaaagggggataatattttttttttttaggatatgtgttatttattttagattttttttttgattaggtttttttgagtgagattttagtattattggttttgatatttaaggaaaaaaggatattatgtgggaaagtattagatttaagataaaaagatttagaatttagtttattttatttttgtattttaagagttatgtgattttaagttagttatgatttttgagttcgggttttttagttttgaaatgggattttgttaatattttttttagttttttttagtggttaatgatgtattttaaatgagagaaatatatgaaattagttttgagttgtgataagtaatataaatataatttatattgagaatagaatgattatataattttaggagttattttgggaaagagaattaaggagagaaaggattaagtagttaataagtgttagttatattttataaattattttatttaatttttatagttattttttaaggtagttatttttatttttaatttatagatagaggaattgaagttttaggggatgagaagtttggttaaggttatataattaaatatatagaatagttggaaattgaagttaggtttagtttgtttagttattgtattttgtagttagttagttattttttttatttgtttttaagtttaaagtaaataaaatattgttttagttggaaggaagttaaaaatattttttaagtgaaagtagtattatagtataattagttttgcgttgaatataagtttttttttgttttaagtattttttagtgattttttttaaaattcgttagtcgatttggttttagtttgtattttagttttattttatttatttttttttttatttattttattttagttagattagtttttggatagttttttgagtataatatgtttttgttttcggggtttttgtatgtggtaagatttttggatttttgtttttttttatttttggttattttattttttatattttttaggtttatttttaaagtatttttttaaaaatttttattaaaagtttttttatttatatttttttagtttttagttattttgttttaaatatttattttaatttttgattaaagtatttttttattttttgttttatattattttatatattttttaggaatagaggttgtatgagacgtgaattatattagtttttttatattatgagaattagtatagggtatttatttaaggttttgttaaataagaggaagggaaatatgggagaaacgaaaagtaaaagggagaaataagtaaaggggataaaggaggtatttggaagtttatgtagttgaatttgtttgttgtaagaatttaaagagataattatgggggaaaagaagtattttaaatcgtgtttgggacgtattatttaatgatttataatttttttttattgaaaatatttttttaatttagaagggttaaataaaattagaaatttaggaaagtaattttttattttaattaaaatcgattttataggagttgaagaaatgtagtttatatagatattttatatttatgttaaagttttttgttttatagttttttttagtttaaacgttatatttttagttaaagtagaaaatttatttttttttaatttttttattgttttttttttttaagttggttgtaaatttttttttattggtttgggaatagttgagtagtagttggaaagattatggtaattagtaatgggtaaatgaaagttaggatgaagaaggatataagaggattttggtaagttagtgttttagagtagtggaattgattttagataagttttttgttagtgtgttagtttaaattgttagtattggtagtgtagttttgttatttatttgttgtgtaattttagtaagttatatagtcgttttgttttttagttttttgaattgtgaaataggaatagtaatttttttatagggttattatgaggagtaaataaaattattgttaagaatttaaatagttatggtagagtaagtataataaattttatttataattatttattgtgtgtgtgtgtgcgtgtgtgtgtgtgtgtgtgtatgtatgagtaaaatgttattagttgatgaaggttttttgtagtatgaataaattatggtttaataagtgaagtttattaattaagttaaatattttggcgtttgaattttgtttgagaatgtttgtttttttgaattttttatttttttttataaaaaaaaaaaaagaaaaagaaaaggtaaaataatagtattgtgaagagagaatggtaaataaagttatcgaattttgtaggagaaaatttttgatttttgaaattttggaagatttttggaattttattttgatgtaatttttgttagatgggatatgattgtataaaaaagagtgatagaaaagttaggagaagacgtgaggtatatttgtaggaaataggtttaggaaaggttgggtaaaagggaaaattttggaaaaattggaaaggatttagaaaaataggattaggattattaacgttaaattattttttatgtttaggtattattttaagggttttgtacgtattaagttcgtttaatatttttatcgattttagaaaatacgtgtttttattatttttattttaaatataagaaaatcgaggtagagagaagtaatgtagtttgtttaatgattatataatttttaaagaatttttttatttaaaggtttaataaaatggaaaatgtggggtttatttagagttggaaagaggagtaatgaggataaggatgggatatgagtttatattagtgaatttatagcgatgtttttgaggttttaaattttaaaagtttttgtataattttagaaagtattttttaaattttgatttttttttaatttattttaataaagaaataattagattgtattagaaaataagttataaaaatatatgtattaataaatttttttgtttgggtgaaaagtagttttaagtttgagagtatgtagtttttttatcgtagttgtaatatttttttttttatttaattttgtttgttttttttaatttgttttaataattaatatatttttagttataataataataaaaaaggatattagaatagtaatagaaaaataatataagattttagggttggtaatagaagataattttttagatattataaattttttgtttatttggtttgtaattagggaattttttatagttaataattattatttttttttttaattttttttgtaagagtaaatttaatttaattttttattgggatatagtaaataaaaaatgcgaaggtatttgaaaaagtttatttatttagatttaattatatatataattggcgtttttttaagtgtgaaaacgttgtaattaataaattaaataataaaatgttatttgagtagaatagatttatatagaagatgtacgagaaattaaaatttattgatttgtttggagtatttttatttagaaaagtttttaaatatagagtaaaacgtttgttttttgagttttgtttttttttggatatttaggttagttattttttttagaggggagttgttgtatagtgatttcgaagtgaataggttttaattttaaaattatttttttgtgttaagggtttattaggtttgtgtttgtatgttagatttttaggattattttatttgtttagtatcgttttttatatgtttagttaatgattattaagtgaagtttaatttagtaatgttattgagtagataaattttatatagaagatgtacgagaaattaaaatttattgatttgtttggagtatttttattagaaaagtttttaaatatagagtaaaacgtttgtttttgagtttgttttttttttggatatttaggttagttattttttttagaggggagttgttgtatagtgatttcgaagtgaataggttttaattttaaaattatttttttgtgttaagggtttattaggtttgtgtttgtatgttagatttttaggattattttatttgtttagtatcgttttttatatgtttagttaatgattattaagtgaagtttaatttagtaggaaggttatttatattagagtttttttgaaatatatatataaggaagattttgtaaatttttgtaaagttaaaggagtggggagataggggtatttagattattaaaatatttttttaggtagtattattaaaaaaaaaattttattaataatagtaatataataatttgagtattgtcgataattttgagttttatgaaatgtatttttaaatgtatttatttttaattgaaattttttgtgaatgataaatttggaataagaaaatgagggagattggatttttgtaattttttggatatatttttgttaaatgtaaattgtttgacggtatggatttattgtattttttatgttattatttgtagtaaaattaaatggaaaaaattttttttttttaataaaatttcgtgataataatattttaaaatatattttatagttgttggttaattatgttaaaggtataatttgatttttgttgttatttttttgaggaaaagagttaattagttgagtaatttttttatttgttgtgttttatgaaaatgaaaatgtaatagattttgggattttaaagttatttatggttataagtgaggaaataaatatataatagtggggatttttattttattattaaattataatgttttttgtttttttgttggttaatttagatagtaaaatggtttttttttgatttgtaagagttaattttttattatattttttgtattatattataaagataattttaagtaattttggttagattgtgttttatttatttgtttgttttggagttttaggatttgataggaaagtagtgtgaaataggtaaagtttagagttatttttagaacgatttaagtaggatttattttttagttttttttagttgcggattttaaagtttggatttagtttttgtttttgtttttttaaatatttattagttaataattatatatttgttttaatggtaataaatttggttgaagaaataatgttttttttttttttattaaaatatgtaaaataatgtaagtttatttgaagattttcgaatttaattattagatttaagtttttttattttaatatttattttattaaatatattggaaagttatgttattttagtatgttttttttttttttgtttgttttttattgtttttattcgtttggttttttttagtaagtttttttagtgagtattttgtttttttattatatatgtcggttatagtgaagttaatagaagtgtttagtaaagttttttgaattttggtataagaatttttttatatagaagagaatttttttcgtttggaaatattttaagaaataaatttatgaaagattgtttgatatgatttagattatatttgattaggatattaaattgagatttgtattttgtatgttttttatttttatatttgtaaagggttttttatataagtttatttaaattgatttttaatgttttatataaatgtagtttttgtaaattcgagttaaagtagaaaatagaagttttatttattttagtatattgaatttttaaatcggtgagtaggataggtaagtttggcgtgtttgaggatgatatttttgattcggtttttggaatataggtgattggtttagtaatttggttttgatagagtatttggttttatttgttttttttttatttgtacgggttaaagtttatttgtatattcggatacgattggatgaataaatttagagtaaaaaaagaaaacgatattatttatttgtaatatttagggtaggaagtttttgattttaaatttaaatttttaagaaattagtgttttagtatcgaatttgtatttggagatagtgtattatttgtagatgaattaatttataaagtcgaaatttgtgataagtgtatgtagtagttgttttggttattaaggttagttattatttttttgattttttatgttttttaatgttattatgtaattttttgttttttgatagatttggaattagagaatttgaggattgaaaagagtttaaaagggtatttgtttttagtagaagttggtgaggagagaattttggttaggtgtttttaggataaggtttttaggaaattagtttattttttagaaaattaaggtgttgtttggggaagaaaggttttttatttatattttattttaagttagttttaaaatatcgtattagttttgtgtatttttagtgttgggtaagtagatttattgtgattttagaagttttaaattatttttattttttatatgtgaatagaaaagttagtaggatttttagggaattcggaatatattgttatatataattattataattagaaatatggtaatattatttattaatatttatttaaaatgaaagtaattttggttttggaagttgtttgtatttattaatataggtagtgtataaagattaaatttaagtagggtttttaaataatttaagtttttaaattaatgtttagttgaaggataattttttaaatagtgttatttttattttaagtataatattttattgtattgtagttttagtaaacgttataataggaataagataaaatattttggatgttttgattgtggagaattaattaatttttttttttttagtgaaatttgttaatttttttgaatatgggatttatatagggaaattaaaaatttttgaattgtttgtttaaattaggtgtagtatttgtttttttttttatttttattttatatttttattttagagatatatagagggtgagtagtttatttatggttatagatttattagtgtaggattagaattttattttaggttagtttgatttttaaatttggatttttatttttgtttattatttttattttattttttataagagaatttttatatgggtttaagtattaattgttttggtttttttagtgaatagttatttttataggtatttaaatataattttttatttatttaagataagaatttgtaaaattttttttgtaaatatttttagtttttgggttggatggtttttgatataatttatttgattttatttaaaagaaattgtagatgataggtaaattaatgggtgtagttgtttttttatagaattttatttaaaaagatagaaggtaggttagatttggtgtacgggttaattttttagattttaaggtaatattatttttaatgtttttgattttttcgtgttttatgtttgatgattagatagaaatttttgtgtttttttaatatttttttgtttttttttttttggaaagtttaattgtttttttttttaaaaatgtgttttgagttaaatgtataattatataatagttgttatataatttgagagtggcgttttttttatgtttaaatagttgtgttttgttgttttttttttttagagttatagttgtttgtggatttaaatattggtttatttgatgtttaggcgatgaaagtttaaggttttataatatatttggtttgttattttattttttatatgattatttttaattgtattttattggataattatgtaagaatagtttttttatattaggtatttttgaatgtaggtaaaaggagttgttttggagataggttattatatttgtttatttaattttagtaaatatttattaagtattatttatgtatttataattttttagttttaattttatttaagtagattttttttgtttagaaattatagggtttgagatttatatttttgaggtaaatattattttgttttgagagtttattttgtagaatagtatatttttgggaattgttgtatatgaggaaaagattttattagattatttttattttttatagaggaaataatggtttttgtgagaatttagggattaaggttgtatattttagaattggatttaggattgtacgtttttatggtatgttaggattatgtagtagaggaggagttgtttttttaatttgagagtaatcgataaatgatgttttatttttttttttttttttatgaataaattaaattatatatatatatatatataggtatatatatatatggagagagaagtaagaaatataagaggatagtttatttattttttgaatttgatttttttagttatttgtgaaagtttttattatattaagaaatatatagattatgattttaattatttttgaaattatttttttattttataataaatatttttagaatttcgtttaatttttagtttttgaaaagataaaaggaatttaatttgttatttaggatttaaaatttttaaaaaaatgttgaaaaaagttatatgatgaattaaaaatagtttttgtaatggattgaattttttttgtttagttataatggatatgttgaaattttaattttttatgtgatggtattaggagatggagtttttgggaggtgtattagtttatttttatgttattaataaagatatatttgagattgggtaatttataaaggatggaagtatttgcgtgtgggtttagtaggttataggttaagaggaggttagtgagtaggtggtgagattttgattttttttttttattattatatcgtttttgggttcgtggtggatggcgacgtggttttcgatgattttgagatttttatgtagtagggagaattttttaattacgatatgtttatcggcgttaattagggagagggttttaagttcgtggaggattttgtagagagcgaggacggtgtgtttgttagcgtttttgattttattgtttttaattttgtggataatttgtatggttattcggaaggtaaggatgtgtttcgggagattattaagtttatgtatatagattgggtcgatcgggataatggcgaaatgcgtcgtaaaattttgttggcgttttttattgattattaatgggtggtattagttgtggttattgttaagttgtacgtcgattattagtttttcgtttatttttatattttttattattattgttaggcggagggtcggtttgagtgggtagatgcggcgtacggggatgaattgttttatgtttttggcgtgtttatggtgggtgttatcgatttttttttttgtaatttttttaagaatgacgttatgtttagtgtcgtggttatgatttattggattaatttcgttaagattgggtgagggttagaggggttgggcggggttgggcggggtttttttttttttatatggtcgtcgtttttttgttaaggtatttattttggtttgtttttttgttcgagtgaaattaatttagatatttttgtgttaggtacggagttgagcgttggagatttagtagtattagatagagaagtcgttgttttttttggggagttgggggtttatttagtggttttggtttggcgtttgttttttttttttttttgtttgattttttttgttcgatttttttagggttttgtatttttggttgattgtttaggtgtgtgtgtttgagtgtgtgtaagagtttgtgtgtttttatttttgtttttgtttttttgaaaatttattgatagttttttatttttttttgttgtttttttttgtttgtttatttttcgttttttttggttgtcggttgattttagtttggttgtgtatttgtttttggttgtttttttcgtgtttttgattttgtttgtgttttatttaggtttagtttttgtttttttttggttatttttgtgtgtgtttttgtttttttgttcgtatttttggttgtttttgttagtttgtttttatttttatttgtttatttgtttgaagagataggtagtttttttgtttttttatatttatttgtgtttttttgtttttgtgattttttttttggtttttttgttgtttttttgtttttttgtatttttgtttgtttttttgtttattgttatttatttttttttagagttttgtttttattttttttttttttgtttttttgtgtttatagggattttaattagtcggtgtcgtaggatattaagtttatttatattaagtttaatcgtttcgaggaggtggtgtggagtaaatttaatagtaaggagaagtagtatttgtatataggtttgaagttacgcgtgcgtgataattatcgcgttaataaggtggttttttggttggagttcgtgttttatttgtataatttgtatacggagttttttattattattacgcgtttgtagtttttttttttttttttaaatagtgatagggttttgttatgttggttaggttggtttggaatttttgattttaggtgatttattcgtttcggttttttaaagtgttgggattatagg

SEQ ID NO: 3 - DNA, 6247 bp, Artificial Sequence
  chemically treated genomic DNA (Homo sapiens)
tggaaaagtatagtgggtaggtatagtaaaattattatagtttattgtatttttgaaaggagaagtttgtgaggatttattttttatttttataatttgttgtggtgattttattatttatagttatttaaattaatgagtatattatatttaaaagttgaagggagaatgttttagtttgggagtgtagtaaaagaatttttagttttttttttggttttataaatatattattttgttttattaaagtatttggatgtgatttttaaatatgtttaataaaatgttattagttgatttttttaattaataaagaaaatgtttaagagttggtagtaaatttttggtgattatgttattagaattagagtatatcgtttgtaagaaatttttagttcggtacggtggtttacgtttgtaattttagtattttgggaggttgaggtagcggattatgaggttaggagtttgagattagtttgattaatatggtgaaattttgtttttattagaaatataaaaattagttgggtatggtggtatatgtttgaaatttatttatttaggaggttgatataggagaattgtttgaatttgggaggtggaggttgtagtgagttaagattgtattattgtattttagtttgggcgatagagcgagattttgttttaaaaaagaaagaaagaaagaaatttttatattttatgtttagtaaaagtagtagtttttcgttatttagtaattaatttgttttaggtgaaatcgatttttgttttaattttatattggaattttgtttattatttatattttttttaaatggaagtatgatttatattttaatttatttagttttttatataatatttattagttagtatttagaattggttatttttttagattagataaagattattgggtatattttttggcggtttttgagttgatttaaatattgttgttatacggttttagatattgatattagttgattggttttttatgtataagtattttttagttatttatataattgaattaaatattttgtatatgttggagttattgtttttgttatataagtttgtttgtttttttatttattgttttttaattttaattatggtatttttatatgggttggatttttttgtttttgtttaaagtaggtaagcgagaagtagaagtgaagaagagtttgatggttttgttaatttttttgttttattatgaatttttttaagttttaaattataggttgttgagaaagttataaaagtagatagtgttaagatattaagattagagtatgtgagagtgtattatttatttatttatttatttaataaatatttattgagtatttattgtgggttagattttatttaaggtattaatattatagtgaatatgaataataaagattttgattttataagatattttagtgaggaagatatattaaaaataataaataaatagatatatttatattaagaaaaataaaatagggttagggatagaaagtagtagagattgatattttagatatggtggttagggaagttttttttagggaggtaatattgaagtagtaattgaattaagtgagaatgatagttggatattataggtaaaggaaatagaatgaatgtaaaagtttcgggttgggaatgtgtttagaatgtttagtagtgtatagtaaggaaggtattttggttgaaatttattaagtgggagaattttataaaaagaggttgaagatgtagttacgggttagggtatttagggtttgtagaatatgtgtagaaaaatttatattttgaattttattttaaacgtgaggggaggttattggaaagttttaagtagtgaattaatatgattagggtattttcggatattaatggttaggtggagaataggttataataaagtgttattagagtttagttacgaaagataaattatttagttattttatgtagagggaattttaagagtaatagatgttaaaaagaataatggggtgatattatagataaaaaagttgttaaaaatatttttagttggaattaatggaattgtattagtttttgtgttatttggagatattattatttttattttttgtttattagagaggtgttattttgattatggaaggaatttttagagtaaagaataattttttttttatttttattatagaaatggttagtaattgttatacgattgaatttagaagtagtaagttattttttattttttgttttttgatttttttatagtgttttttattggtagaagttagcgggtacgagagtttgggaaatggggtttatatattttaggtttttgtagtagagtataaaagggtaagtgtagaattgagaaataataatttttagagttaagagtagaagtagggggtcggcgaggtggtttatatttgtaattttagtatttcgggaggttgagggagggggattatttgagtttaggagtcggagattagtttgggtaatatcgtaagtttttatttttataaaaaatataaaaaaatttagttaggtatggtgatatatatttgtagttttagttatttgggaggtggaggtgggaggattatttgagtttgggagttggaggttgtagtgagttatgattatggttattgtattttagtttgggtgataagagtgatattttgtttaaaaaaaaaaaaaaaaaaaatttcgaaagagtagaagtagggaaattattaggatgttcggtttgtttttttttttttatttttttttttttagttgtggtaatttagttaatttaaagattttgttttttataattttaatttttttttagatttgattaagttaagtagagttggttaaatttaatgggaaaaagattaaaataataatagaaataaataaagaaatagttaagtaaaagaaatgatcgtataatttgtattattgagcgttttaatggtaaggagaaattaagattagttggttgttaattttaattttagttattaaggagagtttttaagataaaattttaatttaggtgtttatttaggaatagggtttaggtttaagattgttttttattattttagaaggagaaaaaaaatttagatttattttttttgttggaagttagatgaaattttagaaaggagttgttttttttttatcgttatggaggtaggaaaacgtattttttttgttgggagtaagtaaaattgtagataaagaggtgtatagtaaaataaattttagattttaattaaattttgggatattagggattttttggagtggggtgtttttaggttttagtaaattgttttgtttgagtaataaaaatagtttaagttggtattaagtattgatagatttgttaaaggttagggttatttttattgagttattttttttggttgttagtttgtaaattaaaattagtttttaattaatttggaagtttattttgttaaggttaaggatatgtttgggagggaggtttgtgtttttatttaaagatgattttgagggttttaatatttaaaagggaggagcgggttggaggggaaagagggagaatatggttattattgaatttatatattgtataaatagaaaaaggaataggtaggggaatagttaattatgtatttgttttttgttgtgtaaattagtattttagtaagataaggtgaggatagagtagttatttgtggggatatttaattttttatttgtagttatttgtttagggatatagagaaaggtagttttttgtatgatttagttttttgtttaattttttttttttggtatagtgaattgagtttttacggtttttgttgttttgtatataagtggagagtttatttgggttagggtttcgagttattttttttttataaatatattttttagagtttagaggaaaggttgggattagagttttttgtgagtattatttatgggattatatgagggagtggttgtgaaaagagggtttcggattaagttttgggtatttgaataagtgagaggttaggaaggggagaaaaatttagtaaaggaattttagaggattcggttagtgagttaaaaagaaaagtgtagaagagtgtagggaaatggtaaagaaaagaaagttttttataagataggatcgattagttgagttaattgttgttgagtatagtgatgagagttgaagtttttcgttcgaaaggtaataaggcgggagggggaaatttgagggtagcgggtttttttttgggagcgggaatacggaattatgggtagcgaggtaaatgtagtttggggagaagttttgagtaacggacgtgcgaggatgatgtttgtgtaagaaggaaatgatcgttgtttcggtttcgcgggagacgaatttcggtttttcgtttttagggattagttttttagggaattgggacggttagtgtcggtcgaggtagtttttcgttgaaggaaggagtaggggatagggaagcggaatggggagcgttaggtttttaattacgtttatttggttatgtttgaagagttataaaatggaggagggaattttttagagcgtgttagagcggagattgtttttcgtcgtagtcggggcgttttcggtagggcgtttatttttagtcgagcgtttttcgtttgtttttttaggattttttttcgttttttttggggtcgtttcggggcgtttttagtaggatggttaatattttttttttatttttatatttcgtcgttttttggttcgtggtcgcgttcggttttcgtattgtttattttattttttatattttagttcgttgttagagtcggggagagggcgggggtcgcgtgggcgaggtcgtgaatagcggttgttacgtgggtcgtttaggttaataggggtgaggttttgggtcgagtttagttttttttcggcgttttcgattggtagtgggatttagcgggcgtggaggtcgcggttgagcgagcgagttttgggcgagtgaattgtggttgtgggttgacggtggagatatttttcggagggaggcggagggaagggaggcgaggtttgtatttgtatgtttttcgttttttattttttagcgttttcggatcgtgtagttttttgtaggattaggttatggagttcgaagttcggcgggttcgataggcgtttttgttcggtcggtcgcgatttttgcggtttcggttgtagtagttggaggttttgcggaggatggtgtaggagcgcgagaaggatattttgacggttatcgtcgtcgatttgtgtaaggtacgtacgcgtgcggcggggtgtggggaaattggttttcgtcgcgtatttgtggattggagtttcggttgggttttgtttttgtttttatatttcggattattttagtattgggagtatgatttttagcgatatagataaagttaaagttttcgtagattttttcggttttttagtatttagaagggtatatgttatttagtttttgtggttttttttttgttttttttatttttgtttatttttttgttatatttgtggtttttttttttatgatgtgtaggaattttttgtatattttggatttaagtaatttgttagtttattgtattgtggatattttttttgggttttttttttttttttttttttaagttaaatttagtagtgggagagttgtatattaatttgaataatagtaatattaataagttttgaataatttattattattagattagtttttgggtttattttttgttttttagttttgtttatggtttttttgttagatagagttttgtttttaagttatagttgtagttaaatttttttttataattttgtgtattattaggttagttttttttattttttaatgtatttatagaatatttaagttttaaagttagatatatttatatttaaattttggtttgattagttgtttttatataagttttagtttttttatttatgaagaaataagaataagagataataatgtttattgtgattttttttttttttttggtgagaattaaatgagaatgtgttatagggtttggtagttaggtgtttaaaattgggggttatttttgtggtgatgttgaatagggttgtttttatatttttattgttttgagggttaggatttttggggttagtttttgttttaaa

SEQ ID NO: 4 - DNA, 6247 bp, Artificial Sequence
  chemically treated genomic DNA (Homo sapiens)
tttagggtaagagttggttttagaagttttggtttttagagtaatggaagtataaagatagttttgtttagtattattataagaataatttttagttttgaatatttaattgttaggttttataatatatttttatttgatttttattaaaaagaaaaaaaaaattataatgggtattattattttttatttttatttttttataggtgagaaaattaaggtttatgtaaaagtaattggttaaattaggatttaaatgtaaatatgtttaattttaaagtttgagtattttataggtgtattaaaaaatgaggagaattgatttaataatatataaagttatgaagaaaaatttgattgtaattataatttagaaataaaattttgtttaataaagaaattataaataaagttaaaagataagaaatagatttagaggttggtttgatggtaatgggttatttagaatttattaatattattgttatttaagttggtatgtaatttttttattgttaaatttggtttaaaaaaaaagaaaagaaagaaatttaaagaaagtatttataatatagtaaattgataaattatttaaatttagaatatataaagagtttttatatattataaggaaaagaattataaatgtaatagaaaaatggataagaatagaaaaggtagaaaaggaattatagaagttaggtaatatatgtttttttgagtgttagaggatcgggaaagtttgcgggaattttggttttatttgtatcgttggagattatatttttagtgttggagtaattcgaaatgtaaaagtaaaaataaaatttagtcgaagttttagtttataagtgcgcggcgggggttagtttttttatatttcgtcgtacgcgtgcgtattttgtataggtcggcggcgatggtcgttaggatatttttttcgcgtttttgtattatttttcgtagggtttttagttgttgtagtcgaaatcgtagaggtcgcgatcggtcggataggaacgtttgtcggattcgtcggatttcgagttttatggtttggttttgtagagaattgtacggttcgggggcgttggggagtgggaggcgggaagtatgtaggtgtaggtttcgtttttttttttttcgttttttttcggggggtgtttttatcgttaatttatagttataatttattcgtttagggttcgttcgtttagtcgcgatttttacgttcgttgagttttattgttagtcggaggcgtcgggggaggattgagttcgatttaaagttttatttttattggtttgggcggtttacgtgatagtcgttgtttacggtttcgtttacgcggttttcgtttttttttcggttttggtagcgggttgggatgtagggggtggagtgagtagtgcgggagtcgagcgcggttacgggttagggggcggcggggtgtagggatggagggaaggtgttggttattttgttgagagcgtttcggggcggttttagaaagggcgaagaggaattttggaggagtaggcggagggcgttcggttgggagtgggcgttttgtcggaagcgtttcgattgcgacggagagtagttttcgttttggtacgttttgaggggtttttttttttattttgtggttttttaaatatggttagatggacgtagttggaggtttagcgttttttatttcgtttttttgttttttgtttttttttttagcgaggagttgtttcgatcggtattgatcgttttagttttttggagagttagtttttgagggcgggaagtcggggttcgtttttcgcggagtcgggatagcggttattttttttttgtataagtattattttcgtacgttcgttatttagagtttttttttaggttgtatttgtttcgttgtttatggtttcgtgttttcgtttttaagagagaattcgttgtttttaggtttttttttttcgttttattgtttttcgggcgagagattttagtttttattattgtatttagtagtagttggtttagttgatcggttttgttttgtggaaagtttttttttttttattatttttttgtatttttttgtatttttttttttagtttattggtcgggttttttggggtttttttgttggattttttttttttttttgattttttatttgtttaggtgtttagggtttagttcggggttttttttttatagttatttttttatgtaattttatgaatagtgtttatagaaggttttaattttagttttttttttgaattttaaagggtatatttgtgaaaagaaaataattcggggttttggtttaaatgaattttttatttatgtataaaataataaaaatcgtgggagtttaatttattatgttaaaaggaaaaaattaagtaaaaagttgagttatgtaagaaattgtttttttttatgtttttaagtagatagttatagataaaaggttaaatgtttttataggtagttgttttgtttttattttattttattgaagtgttgatttatatagtaggaggtaaatatataattgattatttttttgtttgtttttttttttatttgtgtaatgtgtggatttagtaatgattatgtttttttttttttttttttagttcgttttttttttttaaatattgaagtttttaaaattatttttagataaaggtatagattttttttttaagtatgtttttaattttggtaaaataaatttttaaattgattgagagttggttttggtttataagttggtagttaaaggaagtgatttagtggaggtggttttgatttttgataaatttattagtgtttggtattagtttgggttatttttattgtttaaataggataatttgttgaggtttgggagtattttattttagagaatttttgatgttttaaaatttggttgagatttaaagtttattttgttgtatatttttttgtttgtagttttatttatttttaataaagaaggtgcgtttttttgtttttatgacgatggaggggaggtaatttttttttggaattttatttggtttttagtagggaaggtgagtttgagttttttttttttttttaaaatggtaaagagtagttttgagtttggattttatttttaggtaagtatttgaattggagttttgttttggaaattttttttggtgattaaagttaagattaataattagttggttttaatttttttttattattagagcgtttaataatataaattgtgcgattattttttttgtttaattgtttttttgtttgtttttgttgttgttttggttttttttttattgggtttgattagttttatttgatttggttaaatttgaaggaaagttgaaattatggagaataaggtttttgaattggttaaattattatagttgaggggaaaaaaatgaaaaagaaaaaataggtcgggtattttgatggtttttttgtttttattttttcggggttttttttttttttttttttagataaggtgttatttttgttatttaggttggagtgtagtggttatgattatggtttattgtagtttttagtttttaggtttaagtgatttttttatttttattttttaagtagttgggattataggtatgtgttattatgtttggttaaatttttttgtattttttgtagagatgagggtttgcgatgttgtttaggttggttttcgatttttgggtttaagtgattttttttttttagtttttcgaagtgttgggattatagatgtgagttatttcgtcggttttttgtttttatttttgattttagagattgttattttttagttttatatttgtttttttatattttattgtagggatttagagtgtgtgaattttattttttaggttttcgtgttcgttggtttttgttagtagggggtattataaggaaattagaaggtaggaggtggagagtaatttattgtttttggatttaatcgtgtggtagttgttggttatttttatagtgaaagtggaggagggattattttttattttaggaattttttttatggttaaggtggtatttttttagtagatagaggatgaaagtgatagtgtttttaaatggtatagaagttggtgtagttttattggttttagttaagggtatttttagtagtttttttatttatgatgttattttattattttttttgatatttattatttttaaaattttttttgtatgaaataattagatagtttatttttcgtgattggattttgataatattttgttgtagtttgttttttatttagttattggtgttcgaaggtattttgattatgttaatttattgtttaaaattttttaatagtttttttttacgtttagaataaaatttaaaatgtgaatttttttatatatattttataagttttaaatgttttggttcgtgattatatttttaatttttttttgtaggatttttttatttagtgagttttagttagagtgttttttttgttgtatattattgagtattttaaatatatttttagttcggggtttttgtatttattttgttttttttgtttgtagtgtttagttattatttttatttaatttaattgttgttttaatattatttttttaaagaagatttttttgattattatgtttaaaatattagtttttgttattttttgtttttgattttgttttattttttttaatataaatgtatttatttgtttgttgtttttaatgtgttttttttattggaatattttgtaaaattagggtttttgttgtttatgtttattgtaatgttagtattttgaatagaatttggtttatagtaggtgtttagtaagtatttattgaatgaatgaatgaatgaatggtatatttttatatattttagttttagtgttttggtattgtttatttttgtggtttttttaatagtttgtaatttgaagtttaaggagatttatgatgaagtaaggaaattggtaagattattaaatttttttttatttttatttttcgtttgtttgttttggataaaaataaaaaaatttagtttatgtggaaatattatagttaaagttgggagatagtaggtgaaaaggtaagtaggtttatataataaaagtagtagttttaatatatataaagtgtttaatttaattatgtaagtaattgaggagtgtttgtgtataggaagttaattaattaatattagtatttagaatcgtgtggtaataatatttaaattagtttaaaggtcgttagagagtgtatttaataatttttatttgatttgaaagggtaattagttttaaatgttggttaataaatattgtgtaaggaattaggtaaattgagatatgaattatgtttttatttaaaaaaaatgtaaataatgaatagaattttagtgtggaattagaataggaatcggttttatttagggtaaattaattgttaagtagcgaagagttgttgtttttgttgagtataagatgtgaggattttttttttttttttttttttgaggtagagtttcgttttgtcgtttaggttggagtgtagtggtgtaattttagtttattgtaatttttattttttaggtttaagtaatttttttgtgttagttttttgaataggtggattttaggtatgtgttattatgtttagttaatttttgtatttttagtagagatagggttttattatgttggttaggttggttttaaatttttgattttatgattcgttgttttagttttttaaagtgttgggattataggcgtgagttatcgtgtcgggttgaggattttttataaacgatgtattttgattttaatggtataattattaagaatttattattaatttttgaatattttttttattagttagagaaattaattgatggtattttgttgggtatatttaaaaattatatttaagtgttttaatagaataaggtgatatatttatggaattaaagagaggattgggaatttttttattatatttttaagttgaaatattttttttttagtttttgaatatgatatatttattgatttaagtagttatgggtaatgaaattattatagtaggttataggggtaaggggtgagtttttataagtttttttttttaggaatgtagtagattgtagtgattttattatgtttgtttattatattttttta

SEQ ID NO: 5 - DNA, 19972 bp, Artificial Sequence
  chemically treated genomic DNA (Homo sapiens)
tgttttaataatgaaaggttttagagtagttgaaagttaggaatttgaatattttagaggaagttaagtggtttgaggtgtttttatcgaaggttttagtattatgagaatgtttgtgtttttgtcggttttatttttgttagtgagtttatagataaggggcgatgaagaattaggaaatagatggaaagaaacgtggaagagaggaaagttttagattgttagggtgaaatttaggttgagagttaagttttagtttattttttggagagattgagttataaggagttataattataatagcgttttagtatatttaggtgattttggtttgtagtatttggttgaggattgtgtgaaagtagttgaggttaaatgtggtggtttatatttgtaattttagtattttgggaggttgatttgggtggattatttgaggttaggagtttgagattagtttggttaatatggtgaaattttgtttttattaaaaatataaatattaattaggtatggtagtgtatgtttgtaattttagttatttgggaagtttgaggtaggagaatcgtttgaatttaggaggtagaggttgtagtgaattgagatggtattattgtattgtagtttgggtaatagagagagatttcgttttaaaaaaaaaaaaaaaaaaaaaaaaagtagttaaggaaggttattatggttataaaagattttttagaagatgggatttgggttggattttgatagggaagatttttataaggagagagggtaggatatgggtggaataggtgtattaatagtagggtattagggatgagagagttgttggttaggattatggtgagtattatagattatagataaattagaataaacgaatttgtggattagcgtgttttgtattgagatatatattacgtatattaatagggacgaagtacgttgtttatattgtatcgatgtatgcgaatgtggataagttagtttatttttttttttttttttttataattaagtttattgttgtttttggtttttttattttggggaatagtatatggtaagaattttagtatttattttatttttttcgtttttatttttatatagttatttgttaattttatttttatattttttttgttaattgagttttttttatttttttgtttttggtttgtttttttattataattgagtttttatgtagtttttagaggaatttttcgaaggtatatgtgtaattttattatttttaggttgaaagattttggttaagagaaatattagtataagttattaagatttaggaggttgtcgggtatggtggtatatgtttgtagttttagtattttgggaggttaaggtgggttgattgtttgagtttaggagtttaagattagtatgggtaatataaagagattttatttttataaaaaaaaaaaaaaaaaattagttggtgttttagttcgtttttatgttgttgataaagatatatttgagattgggtaatttataaaagaggtttaggttaggtgcggtggtttatgtttgtaattttagtattttgggaggttaaggtaggtggattatttgaggttaggagttcgagattagtttggttaatatgttgaaattttatttttattaaaaaatataaaaattagttagtcgtggtggtacgtttgtaattttagttatttggaaggttgaggaaggagaatcgtttgaatttgggaggcggagtttgtagtgagttaagatagtattattgtattgtagtttgagtgatagagttagattgtgttttaaaaaaaaaaaaaaagaaaagaagtttaatggatttatagttttatatagttggggaggttttataattacggtagaaggtaaggaggagtaagttacgttttatataaatggtcgtaggtagaaaaagagtttgtgtagggaaattttcgtttttaaaattattagatttcgtgagatttatttattattaaaagaatagtgtagtaaagatttgtttttataatttagttattttttattaggttttttttataatatgtgggaattgtgggagttataattttagatgagatttgggtagggacgtagtgaaattatattagttaggtatggtggtatgtatttgtaattataattatttaggaggttgaggtgggaggattaattgagtttgggaggtcgaggttgtagcgagttgtgattgtgttattgtattttagtttgggtgatagcgagattttggttttggggaaaaaaaataagaagatttagaaagttatagtgatgaaaatagtgttatattggtatacgtatatagagattaatgatatagaatatatagtagtttagaaatagttatttatagttatttagtagtaaaaagatgattggtaggatgtatttgtgttatatatgatagataaaatgttaattgtttggatatatataaagtatttataaattaattttagaaagattaataatttaatagaaaagtgagttagagatatgagtagttagtttatagtagaggaaatatgtatgattttatttaggtagagatgtttaagtttattcgtaaaagagaagtaaattaatgtggtagtgaaatgttattttttcgttttttagattagtaaagttaaaaaaaaaattttgaaatttttattggtgagggtgtaaggaaatttagatatgataggtagtggggtataaattaaatttttttggagggtaatatatttgtatttaaattgtaaatattttttgttttatttttattaatttttttttttttttttttttttttttttttttttttttttttttttttttttttttttttgagacgtagttttattttattatttaggttggagtttagtggtacgattttagtttttggtttattgtaatttttgttttttagatttaagtaattttttgttttattttttggagtagttgggattataggtattgcgattatttttggttaattgtgtgtgtgtgtgtgtgtgtgtgtgtgtgtgtgtgtgtgtgtgtgtgtgtgtgtttagtagagatggggttttattatgttggttaggttggtttcgaattttttattttaagtgatttattcgttttagttttttttttagagtgttgagattataggtacgagttatggtgttagttttatttttattaattttttaagtaaattaagagtatatattgtggtattgtttgtagtggtaaaagattggaaataatttaaatgtttattataggaaatttatgaaataaaattattttatgtatttagaggaatattatgaaattgttgaagagaatggggatatagtttttgtgtgttgtgataaaacgatttttatatatagtattaagggaaaaaaagtatttggtacggtggtttatgtttgtaattttagaattttgggaggtcgaggtgggcggattatttaaggttaggagttcgagattagtttgattaatatgatgaaattttatttttattaaaaatataaaaattaattaagtgtggtggtatgcgtttgtaattttagttatttgggaggttgagataggagaatcgttagaatttgggaggtggaagttgtagtgagtttatatggtgttagtttgggtaataagagtgaaattttatttaaaaaaaaaaagtaaggcgttattgggaaggggaagtggggtttgtatggttgaatttagagaaggaagggagttttggttattagattatttttgtagttgatttttaaatttattttttttttttttggtataggggttatttattttttagatttttttgtatggaggtatggttgtgtgattgaaatttagttaggcgagtaggtttagtttatagaaattttttatgggttatttttatgttttttttttttttggtttgtgtggaatggtgttgagtttttagggcgattttggtggaatttggtgttgaaattagagttttatcgtcgggcgcggtggtttacgtttgtaattttagtattttgggaggtcgaggtaggcggattatgaggtgaggagatcgagattattttggttaatacggtgaaatttcgtttttattgaaaatataaaaaattagtcgggcgtggtggtaggcgtttgtggttttagttatttcggaggcggaggtaggagattggtgtgaattcgggaggtagagtttgtagtgagtcgagatcgtgttattgtattttagtttaggcgatatagtgagatttcgttttaaaaaaaaaaaaaaaaaaaagaataagtaaattatgtaaattattttgttttaaattttgaatcgttgtttttaagatcgtttttgtttttgttttggtcgtttttttttttgttaattgggttttatttattttttttatttttttaatacgtgttaggtggttttattttttggtttttgtttttgttgttttttgttattatttaggttttatttgttattttttgattatggtatttataaaagtagtgtcgtttgttttatttatgttatttcgtttattttttttattttcgaaatgatttcgtttttgggtttacggtcggtttttttatttggagtattagtcgggaaggttagggtcgttttggttcgggtttgtttatattggggttaaaggtatatattgggggtttaattaaggcgagttgcgttcgcggggtcgggttttttcgtataggcggagggcggtggcgggcgcggaggcgtcgcgcgagttagggggtagttacgggtcgggggtatttagcgttattcgtttcgtttgtattagttgcgcgttttatttcgaggaatggtagaggtagtttcgttttcggttcgttttcgtttttttattggttgtcgcgcggggcggggagcggggtcggtttagtggttttgagattttagttttgttttcggttcgttcgttgttcgttagttcgttgcgatgttgcgcgttgtcgttcgtttcgggtttcgtttgggtcgtcgttttttgttagtcgtcgttatttaggtcgtgtttgtttttaattagtagttcgaggttttttgtaattaggtgagtttatcggtcgggttcgcgttttgtttttcggttcgagtttttcgtaggtttttaggaaggtttcgcgtcgtcgtgggttttagtgtatttatttggggttcgaggggtttgtagaggttgatttggaagtatatttgttttttttttttttgtaagtattttagttttttcgtcgtttttgatagttttcgttttattttttcgtgatttgggtttttttttcgttttcgtttagtttcggtttgttttttagggttaattttcggggtttcgttttttttatggtttttgttttcgggttttcgtagggtttttatttttatttatttagaagacgcgattaagtttttttttgtaggaatttttttgttttttttttagttattttttttattttttgatttatgtttttatttaaggagtttaaaaggaaaaattaggaaagaggtgatttgtagttacgttttttagtttattatgggcgaggttacgttcggttgtttttattgttgggagtagggaattttggaggattttcggttttagggggtcgattttaaggggtgtttgcggtttttaacgtcggtttcgattaaattaaggaggagttttttaggataaaattgatttttgtggtttatttattgattgtttaattagtaatattttggaatattttttgttttgatttttgagtttggttaaagttttagattttatagaggttgaaattggttatgaaagagtttgttttgtttgtgttagtgtatgttggttgttttttttgatttaagtttttttttttataaatggaaaggcgttttgagggttaggtttatataggtttttattaattagttattttatagttaattatagtttttgttttgtttgtatagtttttgtgtagtattgttttaagcgtttatttgttttgtaatttaaggtaatttttataatagttttagtaggaagggattgtaattttttattttatagatgaagagattgagttataaagaggtttagtgatttatttaaagattaaagttagtggtatagttggggtttatagttgaatttttaggagtaagtttttaattagaatattttatggtatgttgtgattttgggtgggaataaagggattatcgattttttgggattattgttgatttgggatgttgtagagttggtttttagttagttgtttttaatagtatatttgttggtttggttttgagtgtggttgtaaatttggatataggtgatgggtaaaggtatatgcgtgtgattttaggggatgttataaaggttatttgtaagggaatttttaaaaggataaaataaaattttttgtataatataagttaaaaaggtagtagttatggtttttttggtagtttgtgtaagtttatgtttggaagatttgagtattaaaagatttagtagaggttaggtgtagtagtttatgtttgtaaattttagtattttgggaggtcgaggtgggatgattcgttgagtttaggatttcgagattagtttgggtaatatagtaagattttgtttttagtttttattaaaaaagtaaattagttaggtgcggtggtatatgtttgtagttttagttatatgggaggttgaggtgggatgattttttgagtttaggatttcgagattagtttgggtaatatagtaagattttgtgtttagtttttattaaaaaagtaaattagttaggtgcggtggtatatgtttgtagttttagttatatgggaggtcgaggtgggaggattatttgagtttaggagttcgaggttgtagtgagttatgattgggttattatatttagtttgagtaatagaataagattttgttttagaaatgtttttaaggaatagttatcgttttaggaatttttttggttataggatttgattaaaatttttattttttattatatgtagatgaggtagttgggtttagatatgtatttaggtttataggtaatatattttgttttttagatttattttgtgggtgtaggttggaggagtcgagttaattttttgtggttgtttttttttattagattttttgagattattaaagtaatatatgtttattgtataaaattgtagaggattgatttataattttttggatatggttagttaaggtgatttatgtttgtaattttagtattttgggatgttaaggtgggaagatcgtttgagattagatgtaaggttgtagtgaattatgattgtgttattgtattttagtttgggtaatggagtaagaatttattttttaaaaaataaataaataaataaatttttttggatattttattttattttttttaagagtattgtgaataggtgggtgtgttttttgtagatattttgtttgtatttataagtgtttgtagtaagagagagagagagagaatgtaagtatattagatttttttttttttttaatataaatgagatgtaattatttatattttgaagttcgtcgttttattgaataatgtatttgggttattattttgagtacgtttagattttatttaattttttttaaggattatagagtattttattttggtggcgtcgtgttggaattggattttttagagttttttgggttgtttgtagtgtggttttattgttgatttagtagggaagagggatggtgtatatagtagtggattttgtattttagttgttttatttgtaaaatggggtaaaatggttgggtgtagtggtttatatttgtaattttagtattttgtaagattgaagtaggcggattacgaggttaggagttcgagattagtttggttaatatagtgaaattttgtttttattgaaaatataaaaattagttgggtatggtggcgcgtatttgtaattttagttatttgggaggttgaggtaggagtattatttgaatttgggaggtagaggttgtagtgagtcgagattatattattgtattttagtttgggtgatagagcgagattttattttaaaaaaaaaaaaaaatgtggggggtaaaattttatttgtattatcgaattgttgtgaggattaaatggggtgaggtttttgtagttataggtagtgttggttttatggttattggtgtttttatattgattgtagttttaagtaggagttgggataatagtgacgttgtggatttgtagtgttttggtgattaaattttatttgatatggatgttgttgtatttgtagtttgttttttgaaggggtgagttagattgtggtaaagtagaatgggagtttggggtgaattaaaatttgtatttttatttttattttttttttttgtttttgtttttgttttgagatagggttttttattgttgtttaggttggagtgtagtagtgtttattgtagttttaattttttaggtttagttaataagttatttttttattttagttttttaagtagttgagattataggtatattttattatatttgattaatttttgtattttttattttattttatttatttgagatagatttttgttttgttgtttagggtggagtgtagtggtgtgattttggtttattttaatttttattttttgggtttaagcgatttttttgtttgagttttttgagtagttaggattataggtgtttattattacgtttggttaatttttttgtatttttagtagagatgaggtttcgttatgttggttaggttggttggttttgaatttttggttttaggtgatttatttgttttggttttttaaagtgttgggattaaggtattgtagttagttaattttttataatttttatagagatggggttttgttatgttgtttaggttgggttttgaatttttaggtttaagtaattttttttttttggttttttaaagtgttgggattatagtgtgaagtattgaattaaagagagaattgataggtaattaaggatggattttttaaggttaggtgtggtggtttatagttgtaattttagtatttttagaggttaaggtgggaagattgtttaattttaggagttcgagattagtttgggtaatatagtaaaattttatttttataaaagtttaaaaaaattagttggatatggtggtgagtatttgtagttatagttatttgggcggttgaggtaggaggattgtttgagttaaggagtttgaggttttagtgagttttgattttgttattgtattttattttgggtaatattgtaagtatatataggtattatatagaaatgtttattgtaattttttttatgttagtaaaagtttaggaaataagttagttcgagttttattgggaaatagatgaatatttatgttatagttataggaggaaataattttttgtatgtagtagttataaattattggtttaatttgtataaataatgtattttaaaaataatatgttaaggaggaaaaatgtttagtattttatattatatgaaattatgaaaattgtataaaattttatgttgtatgtagatagatagatttttataaaaaatgtgtaagaatgtgttggaaggaaaattttttttggtgtgagggtggttattgtttgagtgggtaggataggataagggtagtgatgaacgaggattttggttttatttaaatgtttgatttttttaaaaattggttaggtacggtggtttacgtttgtaattttcgtattttgggaggttgaggcgggtagattgtttgagtataggagttcgagattagtttgattaatatggtgaaattttgattttgttaaaaatataaaaattagttaggtttggtagtttacgtttgtaattttagttatttcggaggttgaggtatgagaattattttaattcgggaggtagaggttgtagtgagtcgagatcgtattattgtattttagtttgggtgatagagtgatatttcgtttgaaaaaaaattttttaaaaaataaaaaaaatttaatattttatgagtagatattaaaagaaaaaagaaaaaatataatggttttttgatgtgttatttttgtagataattattgttaacggtatatttgaagtagaaatttgtttttttttgtttgtttgggagatttttatagaatgagttaaaatttgtgttttggagtgattttgtgttgattgaatttttttattgattgtataggttgatgatttttttaggagtgttttttgtttttgtttttgtttttgagatgtagttttattttgtcgttcgggttggagtgtagtggtacgattacggtttattgtaatttttgtttttcgggtttaagcgatttttttgttttagttttttgagtagttgggattacgggtgtcgttattatgtttagttaattttgtatttttagtagagttggggttttattatgttggttaggttagttttaaatttttgattttgtgatttattcgttttggttttttaaagtgttgggattataggcgtgagttattgtatttggttttttttttttttggtttttttttttttttttgagatagggttttgttttgttgtttaggttggagtgtaatggtatgattataatttattgtaattttaaatttttgggttgaagcgatttttttgcgttagttattagaggtattgggattataggtatgggttataatatttagttaggagttttaagagtttttatagaaatagatttaggtggtcgggtatggtagtttatgttttggtataagagtgaggtttagtgatagagtgagatttcgttttaaaaaaaaaaaataaaaagaaatagatttaggtaggttgggtgtggtggtttatgtttgtaattttagtattttgggaggtcgaggtaggcggattattttaggtggagattagtttgattaatatgatgaaatttcgtttttattaaaaatataaaaattggtcggtgtggtggtatgtatttgtaattttagttatttgggaggttgagataggagaaacgtttgaatttaggaggcggaggttgtggtggggtttagtgatatcgttcgttttagttttttaaagtgttgggattataggtatgagttatcgtggtcggttcgtgtttttaattagagaatataaatgggtatttaatattttttgtttgtttagaatttgtgggatatatttgagttttaggtgatagggttataataatgtttgtgtttttgaggttaagttgagttgagaatttatatgttgtggatatgtgtatgtattttttgttttagtaattatgattatttattatttattttttattaggttttttattgaggatttttatttgtattttattttttattttattcgtaattttataagtttggtagtattgttgtttcgttttgcgggtgaggaaattgaggtttagggaggttaagtttatattaagtataattaagggtatgtgtgtgaaggttgggtagggtagaatttgaagtttatttttaaatttataatttaatgtgaatttgatttttttgaataatgattagattataagaatgtattaataaatatttaagggataattgaatagaattttaaaattagagaggaggagttatgtttgtattgtttatttttgtatttttggtatttagtattttagtataggattattgttgggtaaatatttattgaataatgaatggttgttatttacgaaattatgtttatagttttgtgttttagaagtgaggtaaagggttgtttaatgagaatttagtatttttatttaaaaggattttattgtaaagtatttggaagtttaaaagagtgggaatatggggacgtatagggagtggtgaaattggtttagggaaagtttattgtagtaagatagaggttgttaaatcgtaagtagaataagttgaaatcgcgtttgtttggtaaatagtttaaagtggaattgaaatttttatttttgaagtggtgaaaaaaggttttggggtgggggagtggggtagagggttggcgtttgtttgtttgggttagttttggttcgggagtgtttcgagtaagtttggggagatgattgtttttcgttttgatttttaattaatttggggttttggattatgtgtggggaagagggaatgtgtgtggtatttcgtgtttgttttgaattttattttttggaattttgtaatataagtaatggtatttgttttttatcggatataattatttaatcgtagattagtaagtgaaagagtatatgtcgttgggattattttaggttgtaaaatcgcgttattagtttgtttattttttgggaaaatacggtgttttagggacggggattttttaggtaatatgtttagtttttttatgtattaaagtttgaattgaaatttttttagaatgtattttgtttttttaaattagaattattgaatatagtttagttttttattggagattttgggtagatgattattgaatatagtttagttttttattggagattttgggtagatgataattatttattgttatgaggtttgggggtggtggttagaattttatttttttttggttttggtttgattttcgtttttaaggtttagttgttttgttttgggtattgattttgttttagtttttgagtttttcgattattataattattattaagtttttgtttggtatggagaataagatagttaaggtgaagagggattttgttattttttaatttagtagttttaatttttatatagtaatttgttttatgtttggaaaaacgtatgtgaaagggttcgttatagttgttgttggaatggcgattatttgttttaaaagtgtatttgtaggaaatcgttaaataaattatggtttgatcgtgttgaggaacgttatgtggtttaatatgaggtagagttgtttgtggaataacgtttaagagaaattgagaaaagcgagttagtaaatagtaagtttattatttttatttagaaaggatacggtagtgtttcggttttttggttttttgggtttttttagtattaagtgtagattttggtatatagtaggtagaatcgcgagtttttcgttttttttttatttatattttgtagttattttttttgtttttaggttttttttagtagttattttttagattttttagttggttaagtttttttttgttttttatttgtttggttttgtttgttttttgcgttttttttttattaggattttagtttttataagttaggatttggtttttggattttttgtgttggagtggttagggttgttagtgaaagtttatggaatgcgtgggtgaatgaatttaatttttataaaataaagtgagatgtatttattaaaatatgtaggaattagagtattttgatagaaaatttttatgttttgtttatagtttagattgaaaatgttaattttagatattattgtgtttttggaaattataaagaggaagtgggagttaggatatttttttattacgtttcgtttaagagcgtttacgtgtgttatgtaagtcgagtttcgggtttttggttaggaggttataaagtatttggtttagagtttggtttggtgtttatttaggaaaattgttttttatttgaagtagaattttggtagaaatttagtgtgagaatagtttttatttagttttttatcggggagggaagttattgagtttggttttgggagaagggaaatgggaaatgtaaatcggaggaggtttttagcgttttatagtagatttaggtttattttattagtggagaagggaggatgggttgttgaaaatgtagtttggtttaatagtgaagggtgattgagaatattttgggttttgaaaggtaaatatgttagggagtggtttttttaggattttaatttaaattagaggggttagtttagcgaggaaggggtggggttggtggggttttagttagattggtttattttttttttttttattttttgatttttgtaaaataaagtttaaaatttaggataatttagtatgttttggtgtagggaataatataaagagtatagatttggttttcgtttttaagaatttttaagttacgagagagttgtaggatttagaatattgtaggattttttgcgggtaaggttttagtttaggaattgtatattcgtttttgtatttaatttttatattagtttttagaagtattcgatgaggtatttgggaagtgaagggatttgtttagggttaaatttgtgagggatggagttagaatttaaatttaggtcgggtatggtggcgtatagttgtaattttagtattttaggagtttaaggtaggaggattatttgagtataggagtttgggattagtttggttaatatggtgaaagtttatttttataaaaaatataaaaaaaattttatttttatttaagaaaaaaaatttaaatttagatttgtttggttttgaggttggtgttttttataatatttagaataaaattttttttttttttgagattttgttgtttaggttggagtatagtggtgtaattttggtttattgtaatttttattttttaggtttaagtaatttttttgttttagtttgtcgagtagttgggattataggtaagtgatattatgtttagttaatttttgtatttttagtagagatagggttttattatgttgtttaggttggtttcgaatttttgattttaaatgatttatttgttttggttttttaaagtgttgggattatagggatgagttattgtgtttggtttagaattaaaatgtgaaattaacgtgtgttgagttagtaagtaaattataaagatggagatttgggaattagaattttaatttttttgaaggtagatttgggttatggttggaggttggagttgggaaaaatataggttttggagttttaaagatttggttttaaagtttggttttgtttttgttgttgtgtgatttagagttaagtggttggatttttttgtgtttagtattttttgttgtgaagtggagaggatgaagtttattttttaggtttgttatgaggtttaaatgggaataatttaagtatatagaatcgttggtgtggggttggtttttgaggggtagttagtgaatgttagttatgtttatgatacgtagagggttgagtggattttttttttgggtgggggaggaagaagtttggggatagtataaggttaattagatttatttttatttagtttagtttagtgtttttttgtatttttttaattttgttgatttaagtgttttgttgtgaggtagttgtgtgtgaggcgtgaattttgagtttgtgttatagggggaaggagagaaggatgtttatttaatggttgtaagttgtttgttcgttttttacgttcgtgagtttttattttttagtaggtagattcgggaattttttttttttttacgggtatttcgaggaggagttgatttttagagtcggggagtaaatatttaggatttgttgtttaggtacggtatagtttaatttgaatttaggtttggtagttttttggttttgaatttgagttttttattgttatatttgtttttatattggaaatgatttagttttttcgtggaaagaaagaagggtgttatttttttaaaaattaacgattgattaattaatatgaaattatataagtacgtttttagaattttagttaatgtttatttatgttttttttcggtgttaagagttttttttgtgggtgtataattgcgggttttattatagagattatgcggaataaattttagtttgggaatatgatttttgttaggtttttatttgaacgatttttttttggggtattttgtttttattttgttatcgttatggcgttgggtatttattttatgtttggcgtagagattgtagatttttatatggttttataaaaagggggttttagggtgatttttattttatagatgaggaaataaagatataggggtgaggtgtttgttttatgtgataaaattaggagtaaaagagtttatattcggttaggcgcggtggtttacgtttgtaattttagtattttgggaggtcgaggtgagtggattatttgaggttaggagttggagattagtttggttaatatggtgaaatttcgtttttattagaaatataaaaattagtcgggtatggtggtaggtatttgtaattttagttatttaggaggttgaggtaggagaatcgtttgaatttgaaaggcggaggttgtagtgagtcgggatcgttttattgtattttagtttggggaataagagttagattttgtttaaaaaaaaagaaaaaaaaaatttttatatttgtaattttagtattttgggaggtttagacgggcggattacgaggttaggagattgagattattttggttaattcggtgaaatttcgtttttattaaaaatatagaaaaattagtcgggtatggtggtaggcgtttatagttttagttatttgggaggttgaggtaggagaatggtgtgaatttgggaggttggagtgtagtgagttgagattgcgttattgtattttagtttgggtaatagaatgagattttgttttaggaaaaaaaaaaaagtttatattcgtttagattttttttttttttttaagagtttttttttgttatttaggttggagtgtagtgatgtaattacggtttattgtagttttaattttttaggtttaaatggtttttttattttagttttttgagtagttgagattataggtacgtaattatatttggttaattttttattttttgtggagagagggttttattatgttatttatgttggttttaaatttttgagtttaagtaatttttttattttggttttttaaattgttaggattataggcgtgagttattgtgtttggttatttagatttttgttttgaatttttgtttttttttgtgtttttttttttgagagagggttttgttttgttatttatgttggaggtagtggtgtgattatggtttattgtagttttaattttttagatttaagtaagtgattcgtttattttagttttttaagtagttgggattataggcgtatgcgattatatttggttaattttttattttttgtggagatggaggttttattatgttatttaggttggttttaaatttttgagtttaagtaatttttatgttttggtttttaaaagtgttgggattataggtgtgagttattgtgttaggttaaatgtttgtttttgattagtgagtttggttatttttttttagttttgttgtgagttttattttaggttttgtttggtagttcggtattttttatggttcgagattttggtttagagtgattatggatgttttattggagttttaggttagggttaggatatgtagggatgttggggttaaagggatttttaaggaaggtaggtagagaggtagatgtttttgtttttacgttatttgtagtttttgttttagtattggtgaggtgattatggattttgttaggatattggtttattaagttcgaagggaatagtttgttgggagatgttttttttgtattttttaagattatcgtttagtgtttggaaagtagagggcgaattttggtattttatgtatgtatttatttttattttttgagacggagttttattttcgttgtttaggttggagtgtaatggcgtgattttggtttattgtaatttttgttttttgggtttaagcgatttttttgttttagtttttcgagtagttgggattataggcgtttgttattatatttggttaattttttgtatttttagtagagatggggttttatcgtgttggttagattggttttaaattttggatttaaggtgattcgtttattttagttttttaaagtgttgggattataggtatgaatatcgtacgtagtttcgtattttaataggtgattttaggtaataagtaaggattttttttttgagtaaatggaggggttttggttttttgatattggttttatgaggaaggaagttttttttttagatgtggtttggttgggtgatggtttggtttgaattatattttagaggcggaatcgttttgggattcgtttttttttttgatttcgttttttattattttttttttggtttattagtaattttggttatttttgtttttttttaaatttattagatttatttttgttttggggtttttgtatttgttattttatagtttggattgttggtttttcggttttttttgtggattttttttttttattatttcggattcggttaaatgtttattttttagggtgatttgtttttattattacggttggagttttttattttttattttagttattttttttggatttttttttttttttcgtttttatttgtatagtttgaggtggttttttgtgtttgattgtttttttattttttgggtattatgagagtatggtttttgttggtttttggttgtattgtgtttttagttttagaattgtgtttggtttatcgtaggtgtttattaagtgtttgttgagtgagtgaagtaataatttagggttgggtatggtgatttatatttgtaattttaggattttgggtggttgaggagggagtatcgtttgagtttagtttggggaatatagagggattttatttttataagaaatataaaaattagttaggcgtagtggcgtgtgtttgtggttttagttatttaggaggttaaggtaggaggattatttgagtttaagaggaagaggttatagggagttatgattacgttattgtattttagtttgggtagtggagtgagattttgttttaaaaaagaaaaaaaataataaaaagaataatttaatttagtttttataataaatttgtgtgggagtggaatagaatgaaggtggttgtaaattgtttgttattttttttagggagaaggggaggttttttttttaatttgggattttggattgagtttgtgatttattttgattaatagaatttggtggtagaaatgaggttaagtgatttttgaagttagattttaggaagttttttagtttttatttgggtttttaggaatattgttttaggggaagttagttgttatgtgggaagtcggattagtttgagttagttatgtagttaggaagtttaagtagttatgtggtgttagacgagtaagtgtagaagttattttgtatatttagttttagaggtggatgattattggttttagttgtttttatattgtagttatataagggaattttgtttagatgagtttaattaggggattttattgtgggagataagaaattattttaagttattaagttttagggtgttttgttatatagtaatggataattagaataagtatgaatattttttttattttttaaagaaattaaggtattgagaagttaagtgatttatttaaggttatttggtagagtgagtattttggtttagattgtttgtaaggtttgtgttttttatttgtaggttatattattttgaaattaatttatatttgtttttttttgtttttttttttttttataatattggtagttagtattaggttgatagttggttttgagaattttttttttttttattgtaga

SEQ ID NO: 6 - DNA, 19972 bp, Artificial Sequence
  chemically treated genomic DNA (Homo sapiens)
tttataatgagaaggaaagaagtttttaggattagttgttaatttaatattgattattagtattgtaaggaaaaaaaaaaataagaaaaagtaaatatgaattaattttagagtggtgtagtttataaatgaaaagtataggttttgtagataatttaggttagaatgtttattttgttaagtgattttgggtaagttatttgattttttagtgttttggtttttttaaaaaatgaagagaatgtttatatttgttttagttatttattgttgtgtaataaagtattttaaaatttggtggtttaaaatgattttttattttttatagtagagttttttggttgggtttatttgggtagagtttttttgtgtggttatagtgtgaggatagttggggttaatagttatttatttttgaggttggatgtgtaagatggtttttgtatttattcgtttggtattatatggttgtttgggttttttgattgtatggttggtttaagttagttcgattttttatatggtagttggttttttttgagatagtgtttttagagatttaggtggaagttgaaaggttttttaagatttagttttagaagttatttggttttatttttgttattaaattttgttggttaaagtgagttataggtttagtttagagttttaggttgaggagagagtttttttttttttttagaaggaatggtaaataatttgtaattatttttattttattttatttttatataaatttgttgtgagaattaaattagattattttttttattgtttttttttttttttgagatagggttttattttattgtttaggttggagtgtagtggcgtgattatggttttttgtagttttttttttttaagtttaagtgatttttttgttttagttttttgagtagttgggattataggtatacgttattacgtttggttaatttttgtattttttgtagagatgaggtttttttatgttttttaggttggatttaagcgatattttttttttagttatttaaggttttgggattgtaggtgtgagttattatgtttagttttagattattattttatttatttagtaaatatttaatgaatatttgcgatgggttaggtatagttttagggttgaggatatagtatagttaaaagttaataaagattatgtttttatggtgtttaggaaataaagaggtaattaaatatagaagattattttagattgtatagatgaaggcgaagggaagaagaggatttagagaaggtgattaaggtggggggtagagaattttagtcgtggtggtaggggtaggttattttgaggagtggatatttgatcgagttcggaatgatgaaaaggaggggtttataggaagagtcggaggattagtagtttaggttgtggaatagtaagtgtaaaggttttagggtaggaataagtttggtagatttgagaaaaagtaaaggtggttagagttattggtgaattagaaaggaagtgataaaaaacggggttagggaggagggcgggttttaagacggtttcgtttttagaatgtaatttagattaggttattatttaattaagttatatttgggggaaagatttttttttttatgaggttaatgttagagagttaaagtttttttatttgtttagaggaagggtttttatttattatttaaagttatttattaaagtgcgaggttgcgtgcggtgtttatgtttgtaattttagtattttgggaggttggggtgggcggattattttaggtttagagtttgagattagtttggttaatacggtgaaattttatttttattaaaaatataaaaaattagttaggtgtggtggtaggcgtttgtagttttagttattcgggaggttgaggtaggagaatcgtttgaatttaggaggtagaagttgtagtgagttaagattacgttattgtattttagtttgggtaacgagagtgaaatttcgttttaaaaaataaaaataaatatatatataaagtgttagagttcgttttttgttttttaggtattgggcgatggttttggggagtgtagagaagatattttttagtaagttgtttttttcgggtttggtaaattagtgttttggtagggtttatggttattttattagtgttgaggtaaaggttataggtgacgtgaaggtaaagatatttgtttttttgtttgttttttttgggggtttttttggttttagtatttttgtatgttttggttttggtttagaattttagtgagatatttatggttattttgggttagagtttcggattataaagaatatcgagttgttaagtaaagtttggagtgaggtttataatagggttggggaggggtggttaggtttattggttaaaagtagatatttggtttggtatagtggtttatatttgtagttttagtatttttggaggttaaggtatgagaattgtttgagtttaggaatttgagattaatttgagtaatatagtgagatttttatttttataaaaaatgaaaaattagttaagtgtggtcgtatgcgtttgtaattttagttatttaggaggttgagatggacggattatttgtttgagtttgggaggttgaggttgtagtgagttatgattatattattgtttttagtatgggtgatagagtaagatttttttttaaaaaagaaaatataaaaaggagtagaggtttaagataagaatttgggtggttaggtatagtggtttacgtttgtaattttaataatttgggaggttaaggtgggaggattgtttgagtttaggagtttgaaattaatatgggtaatatagtgagattttttttttataaaaagtgaaaaattagttaggtgtggttgcgtgtttatagttttagttatttaggaggttgaggtgggaggattatttgagtttgggaggttgaggttgtagtaagtcgtgattgtattattgtattttagtttgggtgatagaaaaagatttttaaaaaaaaaaaaagaatttggacgaatatgggttttttttttttttttgagatagagttttattttgttgtttaggttggagtgtagtggcgtaattttagtttattgtattttaattttttaggtttatattatttttttgttttagttttttaagtagttgggattataggcgtttgttattatgttcggttaatttttttgtgtttttagtagagacggggttttatcgagttagttaagatggttttaattttttgatttcgtgattcgttcgtttgggttttttaaagtgttgggattataggtgtgagggttttttttttttttttttttagataaagtttggtttttgttttttaggttggagtgtaatggagcgatttcggtttattgtaattttcgttttttaggtttaagcgatttttttgttttagttttttgagtagttgggattatagatgtttgttattatgttcggttaatttttgtatttttagtagagacggggttttattatgttggttaggttggtttttaatttttgattttaggtgatttatttatttcggttttttaaagtgttgggattataggcgtgagttatcgcgtttggtcgaatatgggtttttttgtttttgattttgttatatgggataagtattttatttttgtgtttttgtttttttatttgtagggtgggaattattttagagttttttttttataaagttatgtgagggtttgtagtttttgcgttaagtatggagtgaatgtttaacgttatgacgatggtagggtggaaatagagtgttttaggaaggagtcgtttaggtaagggtttagtaggaattatatttttaggttgaaatttgtttcgtataatttttatggtggaattcgtagttgtgtatttataggaaaggtttttggtatcggagaagaatatgggtaaatattaattggggttttggaggcgtgtttgtgtggttttatattagttagttaatcgttaatttttagggaaatggtatttttttttttttttacgggagggttgggttatttttagtgtggggataggtgtggtaataaagagtttaggtttaaagttaggaaattgttagatttaagtttaagttggattatgtcgtgtttgggtagtaggttttgggtgtttatttttcgattttgaaagttagttttttttcggggtgttcgtggaggagaagggagttttcgggtttgtttgttggaagatgggggtttacgggcgtggggggcgggtaggtagtttgtagttattgagtaggtatttttttttttttttttttgtagtataggtttagggtttacgttttatatataattgttttatagtaaagtatttgggttagtagggttaggagagtatagagaagtattaggttgggttgggtggaagtaggtttggttggttttgtattatttttaagttttttttttttttatttagggaggaagtttatttagttttttgcgtgttatggatatggttaatatttattagttattttttaagaattagttttatattagcggttttgtgtatttggattgtttttatttaaattttatagtaaatttaggaggtgaattttattttttttattttatagtagaggatgttgggtatagaagagtttagttatttggttttaggttatatagtagtaaaggtagagttaggttttgaagttaggtttttgggattttaaggtttgtgttttttttaattttaatttttagttatagtttaggtttgtttttaaggaggttggaattttgatttttaaatttttatttttatggtttatttattgatttaatatacgttgattttatattttgattttgagttaggtatagtggtttatttttgtaattttagtattttgggaggttaaggtaggtggattatttgaggttaggagttcgagattagtttggataatatggtgaaattttgtttttattaaaaatgtaaaaattagttgggtatggtgttatttgtttgtaattttagttattcgataggttgaggtaggagaattgtttgaatttaggagatggaggttgtagtgaattaagattgtattattgtattttagtttgggtaatagagttttaaaaaaaaaaaaaattttattttgaatgttgtaaaaagtattaattttaaagttaaatagatttgggtttgaatttttttttttaaataaaggtgggattttttttgtattttttgtagagatgggtttttattatgttggttaggttggttttaaatttttgtgtttaagtgatttttttgttttggatttttaaagtgttgggattatagttgtgcgttattatgttcggtttgggtttgaattttgattttattttttatagatttgattttgggtaaatttttttattttttagatgttttatcgagtatttttgggggttgatgtgaaggttaaatgtaagaacgagtgtatagtttttaagttaggattttgttcgtagggggttttgtagtgttttagattttgtagttttttcgtagtttaaagatttttaggagcgagggttaggtttatattttttatgttgttttttgtattaaagtatattaaattgttttggattttaaattttattttgtaaagattaggaagtaggaaggggagaggtgggttagtttggttaaaattttattagttttatttttttttcgttgggttggtttttttgatttagattaggattttggaaagattattttttggtatgtttgttttttaaagtttagaatgtttttaattattttttattgttgaattaggttgtatttttaataatttatttttttttttttattgataagataaatttgggtttgttgtaggacgttggaaatttttttcggtttatattttttatttttttttttttagagttagatttagtggttttttttttcggtggggggttgggtaggaattgtttttatattgagtttttgttaaagttttgttttaagtgaggagtagtttttttgaataaatattaggttagattttgggttaaatgttttataattttttgattagaaattcgaagttcgatttatataatatacgtaaacgtttttgggcggggcgtggtggggggatgttttagtttttattttttttttatagtttttagaagtatagtgatgtttggagttgatatttttaatttagattgtaggtaaaatataaagattttttattaaaatattttaatttttatatattttaataaatatattttattttgttttgtaaaaattggatttatttatttacgtattttataagtttttattgatagttttggttattttagtatagggagtttaagagttaagttttggtttgtgggagttgaagttttggtgaggagagggcgtaggaaataagtaaaattaagtaagtgagaagtaggaggaggtttggttagttgaggggtttgaagggtgattgttaggaagagtttggggataggaggagtggttgtagggtgtaggtgaggggagagcggggggttcgcgattttatttgttgtgtgttaggatttgtatttgatgttgggaggatttaggagattagagaatcgggatattgtcgtgttttttttaagtgggggtaatagatttgttgtttgttaattcgttttttttagttttttttggacgttattttataggtagttttgttttatgttaagttatatagcgttttttaatacggttaggttatggtttatttaacgattttttataaatgtatttttaggataagtgatcgttattttagtaatagttgtggcgaatttttttatatgcgtttttttaaatatggggtagattattgtgtagaaattagaattattgagttagagggtaataggatttttttttattttggttattttgttttttatgttaggtagagatttagtggtgattgtggtggtcgaggggtttaggagttggggtagggttagtgtttagagtaggataattggattttgggggcggaggttagattaaggttaggagagaatgaaattttggttattatttttagattttatgataatgggtggttattatttgtttagggtttttaatgaaaggttaaattgtgtttagtaattatttgtttagggtttttaatgaaaggttaaattgtgtttagtagttttgatttaaggaggtaggatatattttagaaagattttagtttaagttttgatgtatgagagaattggatatgttatttaggaaattttcgtttttggaatatcgtatttttttaaagagtgagtaagttaatggcgcggttttgtagtttgggatgattttaacggtatgtgtttttttatttgttaatttgcggttaggtgattatgttcgatggaaagtagatgttattgtttgtattataagattttagggagtaaagtttaagataaatacggaatgttatatatatttttttttttttatatataatttagaattttaggttagttggggattaaggcgaggggtagttatttttttaggtttgttcgggatattttcgaattaagattaatttaggtagatagacgttagttttttgttttatttttttattttagggtttttttttattattttaaagatgggagttttaattttattttggattgtttgttagataggcgcggttttaatttgttttgtttacggtttggtaatttttattttgttgtaatggattttttttgagttagttttattattttttatgcgtttttatgtttttatttttttaaatttttaaatattttgtaataaggtttttttgagtagaaatattgggtttttattaagtaattttttattttatttttggagtataaaattgtaaatatggtttcgtaaatggtaattatttattatttaataaatatttatttaatagtgattttatgttaaggtgttaggtgttaggaatgtaaaagtgaataatataaatatggttttttttttttgattttaaaattttatttaattgttttttaaatgtttattaatatatttttatggtttgattattatttagggaggttaagtttatattaagttataagtttgaaagtgggttttaaattttgttttgtttaatttttatatatatgtttttagttatatttaatgtgaatttgatttttttgagttttagtttttttattcgtaagacgggatagtaatattattaggtttatagagttgcgggtaggatgaaaggtgaaatgtaggtagaagtttttagtagagggtttgatggaaaataggtgatgaataattatgattattggagtagggaatatatatatatgtttataatatgtaaatttttaatttagtttgattttaggagtataaatattattatagttttgttatttgaaatttaagtgtgttttatagattttgggtaggtaggaagtattgaatgtttatttgtgttttttgattaaaaatacgggtcggttacggtggtttatgtttgtaattttagtattttgggaggttgaggcgggcggtgttattgggttttattataattttcgttttttgggtttaagcgttttttttgttttagttttttaggtagttgggattataggtatatgttattatatcggttaatttttgtatttttagtagagacggggttttattatattggttaggttggtttttatttgaggtgattcgtttgtttcggttttttaaggtgttgggattataggtatgagttattatatttagtttgtttaaatttatttttttttgttttttttttttgagacggagttttattttgttattaggttttatttttatgttagggtatgagttgttatgttcggttatttaaatttatttttatagaggtttttaaaatttttagttggatgttgtggtttatgtttataattttagtgtttttagtggttgacgtaggaggatcgttttagtttaagagtttgaggttgtagtgagttatgattatgttattgtattttagtttgggtaatagagtaagattttgttttaaaaaaaaaaaaaaaaattaaaaaaaaaagaggttaggtgtagtggtttacgtttgtaattttagtattttgggaggttaaggcgggtggattataaggttaggagtttgagattagtttggttaatatggtgaaattttaattttattaaaaatataaaattagttgggtatggtggcggtattcgtaattttagttatttaggaggttgaggtaggagaatcgtttgaattcgggaggtagaggttgtagtgagtcgtgatcgtgttattgtattttagttcgggcgatagagtgagattatattttaaaaataaaaataaaaataaaggatatttttaaagaagttattaatttgtataattaatagggagatttagttagtataaagttattttaaaatataggttttggtttattttgtaagaattttttaggtaaataagaaaaagtaaatttttgttttagatatatcgttaatagtgattatttgtaggggtggtatattaggggattattatattttttttttttttttttaatatttgtttatggggtattaagttttttttgttttttggggagtttttttttagacgaagtgttattttgttatttaggttggagtatagtggtgcgatttcggtttattgtaatttttgtttttcgggttaaagtgatttttatgttttagttttcggagtagttgggattataagcgtgggttattaggtttagttaatttttgtatttttagtagagttagggttttattatgttggttaggttggtttcgaatttttgtgtttaagtaatttgttcgttttagttttttaaagtgcggagattataggcgtgagttatcgtgtttggttaatttttaaagaaattaaatatttaaatgaagttagagttttcgtttattattatttttattttgttttgtttatttaggtagtaattatttttatattaaggagaattttttttttagtatatttttatatattttttatggagatttgtttatttatatataatataaagttttgtatagtttttatggttttatatggtgtagagtgttggatattttttttttttgatatattgtttttgagatatattatttgtataggttgagttaatgatttgtaattgttatatgtagaggattatttttttttataattgtaatataggtgtttatttattttttaatggagttcgagttggtttattttttaagtttttattgatataaaagaagttgtaatgaatatttttgtatggtgtttatgtatatttgtagtgttgtttaggatggagtgtagtggtaagattaaagtttattgaagttttaaattttttggtttaagtaatttttttgttttagtcgtttaagtagttgtgattataggtgtttattattatgtttagttaatttttttaagtttttgtagagatggagttttgttatgttgtttaggttggtttcgaatttttggggttaagtaatttttttattttagtttttgaaagtgttgggattatagttgtgagttattatatttagttttgggaaatttatttttaattgtttgttagttttttttttagtttagtgttttatattgtaattttagtattttgggaggttaaggagggaagattgtttgagtttagaagtttaagatttagtttgggtaatatggtaaaattttatttttataaaaattataaaaaattggttggttgtagtgttttaattttagtattttgggaggttagggtaggtggattatttgaggttaggagtttaagattagttagtttggttaatatggcgaaattttatttttattaagaatataaaaaaattagttaggcgtggtggtgggtatttgtaattttagttatttaggaggtttaagtaggagaatcgtttgaatttaggaggtggaggttagagtgagttaagattatattattgtattttattttgggtaatagagtaagagtttgttttaaataaataaaataaaataaaaaatataaaaattagttaggtgtggtggggtatgtttgtagttttagttatttggaagattgaagtaggaggataatttgttgattgagtttgggaggttgaggttgtagtgagtattattatattttagtttgggtaatagtgagagattttgttttaaaataaaaataaaaatagaaagagagggtaagaataaagatgtaagttttaatttattttaaatttttattttattttattataatttagtttatttttttaggaaataaattgtaaatataatagtatttatattaaatggagtttgattattaagatattgtaagtttatagcgttattgttattttagtttttgtttaaggttgtagttaatatggaggtattagtggttatgaagttagtattgtttgtggttgtagaagttttattttatttggtttttatagtaattcggtgatgtagatggaattttattttttatatttttttttttttttgagatggagtttcgttttgttatttaggttggaatgtagtagtgtgatttcggtttattgtaatttttgttttttaggtttaagtgatgtttttgttttagttttttaagtagttgggattataggtgcgcgttattatgtttagttaatttttgtatttttagtagagatagggttttattatgttggttaggttagtttcgaatttttgatttcgtgattcgtttgttttagttttgtaaaatgttgggattataggtgtgagttattgtatttagttattttattttattttatagatgaggtagttgaggtgtagagtttattgttgtatgtattattttttttttttgttgagttagtaataaggttatattgtaaatagtttagggggttttaagaggtttagttttagtacggcgttattagagtagaatgttttgtggtttttggaaagggttaaatgagatttgaacgtatttagaatgataatttaggtatattgtttagtgagacggcgagttttagaatataagtggttgtattttatttatgttaaaaaaaaaaaaaagtttggtgtgtttgtatttttttttttttttttttgttgtaggtatttgtaaatgtaaataaaatgtttataagagatatatttatttgtttatagtgtttttggagggagtaaaatggggtatttagagaggtttatttatttatttattttttaagagatgggtttttgttttattgtttaggttggagtgtagtggtataattatagtttattgtagttttatatttaattttaagcgatttttttattttggtattttaaagtgttggaattataggtatgaattattttgattgattatgtttagagagttgtaagttagttttttgtaattttatatagtgggtatgtgttattttaatgattttaaaaagtttgataaagaaaagtagttatagggaattgattcggtttttttagtttatatttatagagtaaatttggagaataggatgtgttatttatgggtttgggtgtatatttggatttagttgttttatttgtatgtgataaaggataaagattttaattagattttgtggttagaagggtttttagggcgatggttgttttttgaggatatttttgagatagggttttgttttgttgtttagattaagtgtagtggtttaattatagtttattgtagtttcgaatttttaggtttaagtgatttttttatttcggttttttatatagttgggattataggtatgtgttatcgtatttgattaatttatttttttagtagagattagatatagggttttgttatgttgtttaggttggtttcgaaattttaggtttaagggattattttattttagttttttatatagttgggattataggtatgtgttatcgtatttaattaatttatttttttagtagagattagagatagggttttgttatgttgtttaggttggtttcgaaattttaggtttaacggattattttatttcggttttttaaaatgttgggatttataggtatgagttattgtatttggtttttgttagattttttgatgtttaagttttttaagtatgaatttgtataggttgttaagggagttatagttgttgtttttttagtttgtgttatgtaaaagattttattttatttttttaaaaatttttttgtaaatgatttttgtaatattttttaaaattatacgtatgtgtttttatttattatttatatttagatttgtagttatatttagggttagattagtaggtgtgttgttgaaagtagttggttaggagttagttttatagtattttaaattagtaatagttttagaggatcggtggtttttttgtttttatttagagttataatatattatggaatgttttggttaggggtttatttttggaagtttagttgtgaattttaattatgttattgattttggtttttaggtgagttattaaatttttttgtgatttagtttttttatttgtaaaatggagaattatagtttttttttattgaggttgttgtaaaaattattttaaattgtaaaataggtagacgtttagaatagtgttgtataaaggttgtgtagataggataggagttgtgattaattatgaagtgattggttgatgagggtttgtgtgaatttaatttttagagcgtttttttatttataggagaaaaagtttaagttagagaaggtagttaatatgtattggtataaataaaataaatttttttataattaattttagtttttgtgaagtttagaattttaattaaatttaaagattaaaataaaaaatattttaaagtattattgattgagtaattaataaatggattataggaattagttttattttggaaagtttttttttggtttggtcgaagtcggcgttggaagtcgtagatattttttggggtcggttttttggggtcgaaggttttttaggattttttatttttagtaatggaagtagtcgagcgtggtttcgtttatggtgaattggagaacgtggttgtaaattattttttttttggtttttttttttgaattttttggatgagggtatgagttagggggtaaaggggatgattaaggaaaagataggaaagtttttgtaaagagggatttggtcgcgttttttgagtgggtgagggtggggattttgcggagattcgaaagtaaggattatggggagaacggaatttcgagagttggttttggaaaatagatcgaggttgggcgaagacggagagggggtttaagttacggggaaatgggacggggattgttagaggcggcgaaggggttaaaatgtttgtaggagaggagggggtagatgtgtttttaggttagtttttgtaaatttttcgagttttagatgagtatattaaggtttacggcggcgcggggtttttttaggggtttgcgggggattcgggtcggaaaataaagcgcgagttcggtcggtgggtttatttggttgtagaagatttcgggttgttggttgggggtaggtacggtttgggtggcggcggttgataagaggcggcggtttaggcggggttcgaagcgggcggtagcgcgtaatatcgtagcgggttagcggatagcgagcggatcgagagtagagttagggttttagggttattgagtcgatttcgtttttcgtttcgcgcggtagttaatggaaaggcgggggcgggtcgggggcggggttgtttttattatttttcgggatggggcgcgtagttgatgtaagcgaagcgggtggcgttaggtattttcggttcgtggttgttttttggttcgcgcgacgttttcgcgttcgttatcgtttttcgtttgtgcggaaagattcggtttcgcgaacgtagttcgttttggttgagtttttaatgtgtgtttttgattttaatgtgaataggttcgagttagggcgattttgattttttcggttgatgttttaggtgaagagatcggtcgtaaatttaaaagcgagattatttcggaggtgaaggagatgaacgaggtgatatggatggggtagacggtattgtttttataagtattatggttaggaaatgataagtgagatttgaatgatgatagggaatagtaagggtaaaggttaggagatgagattatttggtacgtgttagagaaatggaaagaatgaatggagtttagttaataaggagagaggcggttagggtaagggtagggacggttttggaagtagcggtttagagtttagaataggatgatttgtatgatttgtttatttttttttttttttttttttttgagacggagttttattgtgtcgtttaggttggagtgtagtggtacgatttcggtttattgtaagttttgtttttcgggtttatattagttttttgttttcgttttcggagtagttgggattataggcgtttgttattacgttcggttaattttttgtatttttagtagagacggggttttatcgtgttagttaggatggtttcgatttttttattttatgattcgtttgtttcggttttttaaagtgttgggattataggcgtgagttatcgcgttcggcggtgggattttgattttaatattagattttattaaagtcgttttgggggtttagtattattttatataaattagaggaagaaaaggtatgggggtggtttatgggaggtttttgtgggttgagtttgttcgtttggttggattttaattatataattatgtttttatgtaaaagagtttgggaaatgagtggtttttgtgttaggaagaagggaaataggtttggagattagttgtagagataatttgataattaagatttttttttttttttgaatttagttatgtaggttttattttttttttttaatggcgttttgttttttttttttagatggggttttatttttgttgtttaggttggtattatgtgggtttattgtaatttttattttttaggttttagcgatttttttgttttagttttttaagtggttgggattataggcgtatgttattatatttggttaatttttgtatttttagtagagatggggttttattatattggttaagttggtttcgaatttttgattttaggtgattcgtttatttcggttttttaaagttttgggattataggtatgagttatcgtgttaggtatttttttttttttaatattgtgtgtggagatcgttttgttatagtatataaggattatgtttttattttttttaatagttttatggtatttttttggatatatgaggtagttttattttatgaattttttatgatggatatttaggttgtttttaattttttgttattataaataatgttataatgtatgtttttgatttgtttaagaaattaatagaaatgaggttggtattatgattcgtgtttgtaattttagtattttgggggggaagttgaggcgggtagattatttgaggtgaggagttcgagattagtttggttaatatggtgaaattttatttttattaaatatatatatatatatatatatatatatatatatatatatatatatatatatataattagttaggaatggtcgtagtgtttgtaattttagttattttagaaggtgaggtaggagattgtttgaatttgggagatagaggttgtagtgagttaagagttgagatcgtgttattgaattttagtttgggtgatagagtgagattacgttttaaaaaaaaaaaaaaaagaaaaaaaaaaagaaaaaaaaaagaaagaaaagaaaagaaagaaattagtagaaatggaataaagaatatttataatttaaatatagatatattattttttaaagaagtttaatttatgttttattatttgttatgtttgagtttttttatatttttattagtagaagttttaggattttttttttagttttgttaatttgagagacgaaaaagtggtattttattattatattaatttgttttttttttacgagtgagtttgagtatttttgtttagatgaagttatgtatgttttttttgttatgaattagttgtttatgtttttggtttatttttttattggattgttggtttttttgaaattgatttgtaggtgttttatatgtatttaggtaattaatattttgtttattatatatggtataaatatattttgttagttatttttttattattaagtaattgtaagtagttatttttgaattattgtatattttgtgttattgatttttgtatgcgtgtgttagtatgatattgtttttattattgtagttttttaagtttttttgttttttttttttaagattagggtttcgttgttatttaggttggagtgtagtagtataattataattcgttgtagtttcgattttttaggtttaattgatttttttattttagttttttgagtagttgtgattataggtgtatgttattatgtttgattgatatggttttattgcgtttttatttaaattttatttagaattgtaatttttataatttttatatgttatgggaagaatttggtgggaggtgattgaattatgggggtaggtttttattgtattgtttttttgatagtgaatgagttttacgagatttgatggttttaaaaacgggagtttttttgtataagttttttttttgtttgcggttatttatgtaagacgtgatttgtttttttttgttttttgtcgtgattgtgaggtttttttagttatgtggaattataagtttattaaattttttttttttttttttttttttgagatatagtttagttttgttatttaggttgtagtgtagtggtgttattttggtttattgtaaatttcgttttttagatttaagcgattttttttttttagttttttaagtagttaggattatagacgtgttattacgattggttaatttttgtattttttagtagagatggggttttaatatgttggttaggttagtttcgaatttttgattttaggtgatttatttgttttggttttttaaagtgttgggattataggtatgagttatcgtatttggtttaaattttttttgtaaattgtttagttttaggtatgtttttattagtagtatgaaaacggattaaggtattagttaattttttttttttttttttgtagagatagggtttttttatgttgtttatgttggttttgaatttttgggtttaagtagttagtttattttggttttttaaaatgttgagattataggtatgtgttattatgttcggtagttttttaagttttaatagtttgtattaatattttttttaattaagattttttagtttggaagtgatgaggttgtatatgtgttttcgagggatttttttgagaattgtatggaaatttagttgtagtggggaggtaggttagaggtagagagatgaggagggtttagttggtagaaagagtgtgaaggtggaattgataggtagttgtgtggagatgagggcgagaggagtggagtgggtgttgaggtttttattatgtgttattttttaggatgggggagttaggagtagtagtaaatttggttgtggggaggggaaggagaaaatgagttgatttatttatattcgtatatatcgatataatgtgggtaacgtgtttcgtttttgttggtgtgcgtggtgtgtgttttagtgtaggatacgttggtttataggttcgtttattttggtttgtttgtggtttgtggtgtttattataattttaattagtagtttttttatttttggtgttttattgttggtgtatttgttttatttatgttttgttttttttttttatggaaattttttttattaagatttagtttaagttttattttttgggaagttttttgtgattatagtagttttttttagttgttttttttttttttttttttttttttgagacggagtttttttttgttgtttaagttgtagtgtagtggtattattttagtttattgtaatttttgttttttgggtttaagcgatttttttgttttaagttttttaagtagttgggattataggtatgtattattatgtttggttaatgtttgtatttttagtggagatagggttttattatattagttaggttggttttaaatttttggttttaagtgatttatttaagttagttttttaaaatgttgagattataggtgtgagttattatatttggttttagttgtttttatatagtttttaattaaatattgtagattaagattatttggatgtgttgaaacgttattgtaattatggttttttgtggtttagtttttttaaagaatgaattaaaatttaatttttaatttagattttattttgatagtttgaggttttttttttttttacgtttttttttatttgttttttggttttttatcgttttttgtttgtgggtttattggtaggaatggggtcggtagaagtataggtatttttatggtgttgagattttcggtggaagtattttaagttatttaattttttttaagatatttaaatttttagtttttaattattttgaaattttttattgttagggta

SEQ ID NO: 7 - DNA, 8162 bp, Artificial Sequence
  chemically treated genomic DNA (Homo sapiens)
ggtcggggtgtgggttggtttgtagaggttttgtagttggggttgtagttaggcggtgatttaggtaggtttcgtttgggttaggagggtcgggtatttttgttgtgaggttgttcgtgtttaatttattatgatttgtattttgttgttattttgtttggtaggttgatttagttaggatggttttagtatttattttttttttagttagtatttatgttttttgtttcgttaagatgttttttgttttgattcggtagaggttttttgggagttagggtttgggtttgggagttatagttttttgggagtaggaaagtttaagggagatggggtgaggattggggtttttgtagtattttaggggaggtttttttttgttcgtatttattttcgttggttgtaaatttgtagtttttttgatttaaggtattatgattggtagtagataaagagatgaagaagttttagaagtttttttttataagtttttagaaggtgtggatatagtggggaaattgtttcgggtatagttagttttgttgattttatgtttttttaaagaggggttttgtaatagtaatagagggttttgtaatagattgattgtttttggttgggtacggtgattggattatagttttttgtggtttttaatttttgggtttaagcgatttttttattttagttttttcgagtagttgggattgtaggtgcgtgttattacgtttagtagatttttatattttttgtagagatagggttttgtttggttatttaggttggttttaaatttttgattttaggtgatttgttcgttttttttttttaaagtgttgggattataggtgtgagttatcgtgtttggttgaatattaagtcgtattatttttatttaaatatgtgtttgtacgtattaagtaagttttttttatttttttatttttttattttttttagttttggtaattatcgatttattttttatttttatgagatttatttgtttggtttttatatatgagggagaatatgtggtatttgtttttttgagttataatatttttaattaacggggaggtttttgagatttattgtttaatttttttttttttatttttttttttttttttgagatagggtttatttggttattttgttttttaggttggagtgtattggtatgattatagtttattgaagtttcgattttttgggtttaagtgattttttcgtttagttttttaagtagttgggtgtatgttattacgtttagttaatttttttttttttttttttttgagatggagtttcgttttgtttttatttaagttggagtgtagtggcgtaattttggtttattgtaatttttattttttaggtttaagcgatttttttgttttagtttttcgagtagttgggattataggtatgtattattacggttagttaatttttgtattttagtagagatggggttttattatgttggttaggttggttttgaatttttgagtttaagtgatttgttcgttttaattttttaaagtgttgggattataggcgtgagttatcgtatttagtttttttttttttttttattttttgtagagatgagtttttttatgttgtttaggttttttttattcgtataaagaaagtggtttttttttttaataattatatttaatttaaatgttttttgaaatttaagtaaattcgttatttatttatttatttatttatttaatattttttttgttagttttgggtgaatttgttgaaaatcgttttgttaaatgattgtttttttattagagggatggttaggtgtagtgggttgttttcgtatttttagaggttttttttgtgttaggatatggtgttgaataaaagttgagatttttgtttttgtggatattttagtttaagggggaataaggagagatatagttatataaataaagatatgaacgtaggttgtgataggtttttggaagtaaggaaggttttatttgagaggtgagagaggttagggaagttgagatttgaatatggataagagttagtttggtgtagagtggaagaaaaagtgttttagggagtaagaatagtatgtgtaaaggttttgtggtaggaaattgtttggttaagttaaggaatgttagtagattggagtgtagtgagaatggtgggaagtggtgcgaagtgaggttggtaaggtagttaggagttaggttaggtaggggtttataggttatgggaggaagttttttgatagtaagggggtgttatttaaggatgtgaattaggggagagatatgtttaggtttttatcgttcgtatgtttttttggtagttatttggagaaggtagttgagtttgatttaaggagagtaggtagagggtaagaatagtggtttgggagagagagagtgagtgatagtttaggtgaggatgaggtattggggatggagtattaggatttgtaaagattaatttatgtttgtaattttagtattttgggaggttgaggcgggaagatgaattgagtttaggagtttgagattagtttgggtaatataatgagatttatttttataaaatatttaaaaattagttaggtatggtggtgggtttttgtagttataaggtgggaggatcgtttgagtatcggaatttaaagttgtagtgagtcgtgatggtattattgtattttagtttgggtaatagagtaatattttgttttaaaaaaaaaaaaaaaaaaagaaaaaagaaaatttgaaaagtaagtatttgtaagtttttagtataatttatatttttatatttttgttattattgaaattataattaaaatttaaatacgtaaataaggattttgtttttcgtagatttgaattgtttttaggttttttgttttgacgtttttattattattgttgttatttttgatgatatttatattatttaatttttttaggatgttttcggttcgttaggtattgttttggttatttcgtgtatttaatgttgtgttgttggtttttgttagttgtttttatggtttttttaggggagggtcgttgttataagaagttagtttcgaatggttttcggttttgtattttgttttttatttaagatttaaatttttaggagagttagggaggttttatggggagtttattttaatttatggttggtttggagaaggtatttggttgattattttattaagtaggaaggggttgtttgtaaagataattagttgttgttattagaaaaggggagaggttggtataggttcggttttttttttttttaggaggtattttattttgtatttattatttagtttagtttttgtataggtgcgaggttttgtagatgtttttttttgttgtttttggaatgttttttattttgttagttttatttgggggtttcgttattttttgtttgtattgttggaagttgtagtttttgggttagattttttttatattgtgttttgtttagggggttttttaaaataaaaaatagtagatatttgtttgtttgataatttttttagcgttttgtatttttatagttagtttggtttataggttttcgtgagttttcgttttaggagagttatttatttttatattttttgttggtaatagtggatatatcgtattttttcgtgatataacgtttttagtttttgtgtttttgtttttgtttttttagtttttttgttgttttttgtttaaatgttttttatttagtttagatgatgtttttttttacggatttttattttagtttttttagtattttttgtttatttggttattatagtgtttatattattttgaaattttttgtttattttgttagttaataaatatttattgagtatttattataaatgttgtatggaggttatagtagtgaataaattaaattttagttgttaggagttaagggataggtagtaaataagatataaacgttttagagaaaaaataatggaggaagacgatagtattgtgttattttttatagtatattggagcgtagtcgtgtgggtggatgtaggggaagggggttttaggtggagagaagtaggagggttagagtatatttttaggattcgtaggttaggatcggaattttgtgtttttttcgaatgaaatgggaagtagggattttatgttggtaagtagtttgtttgtaggcgggtgagggtggcgggaagcgtttggtgagaggggtcgagagtttgttttatatttgttttttttttatagcgtggtgtagagtaggagtttagcgaatattgattagatagcgtgggaacggtttttttagatttttttttttttaagtatttttggttttcggtgattatatagatttttggttttttttttagttatttaacgagagagtagatttatggattggagatttttattaaaagtttttagtttgtggttttttagggttaggatttttgatttaatggggttttgtgtatattgggggatgtgaagggttcggggtagcggtggttgggggtgcgtttcgggggagttgtatgtttttattgtggttcgtggttgagttttgtcgattttatgtaattagagaatttagagaatcgtatttggtagcggtaagtttggaaagttggaagagttttatgttaggttgaattaattagtagtttttacgtttagggtaaatataggtttttttgaagattggagatgtgttttgtttaagtttttagaaatattttcgtattttagaagtgaataaaagtaaatagttcgggatttaatttttaaaatttgggttgtagggagtagaggtttagaggacgttatattttatatttgaatattttttttttttgttacgtaaattttttgggtaggaattttaagggtttaatggacgggaagtagggtttttaaatacgtttttttttggtttttgtcgttttaggagttttagttatcgggagaggttgtgttaaaggtaatttttttttttgtattttttatttttttttttgtttaggtggagtttgtatttagagtcggggttttaagtgttaagagttttatattatttttttagggggtttttgtttttgggattattatttttggagtatttttttggatttttggtagttttgttattttttaaattaggaggtagaggttttagggattcgcggagtagggatattaaggtggtcgtggagtgagaggttttgatgggtcgttagattttatgattggaaggaaggtagtagagtcgagtgttaaaggtatgagttgttgatagagatgtatgtgggtttaaattttgatatgttatttgttaattgtgagattagatatagtattaaacgttttttagtttttttttttttatttgtaaaatgtatttataatcgttttttttttatgggtattattatagagtttttgtgaggatggaaggtaatgaggaggggaggaggtgttattggggggtaaagttaatattggtataggtgagaggagcggggtgtaggaatgtggggtgtgaggcgacgggttttggggaggtttttagtgtatgttgtagtagtttttatttgggtgtagttgcgacgtgatggtgtttatttatttttgtgaagtggtatttttgttaatttgtttttcggggaagttttgggaaggtcgtttagtttagagattatagttttaagtggcgatgttggggtgtaaggttaatttcgttttacgtttattaggttttttttatttgggttgtttgttttggtttgatcgtataaggttcgggagagaagcgggatttttttttttgggttgtggttagtaggaggggtttggtttatgggattgaggaggttttagtgagggggtttttttagttttttattagaatatagggagggattatggaagggttaggtttagagtatttttaatgttagtaggttttttttttttgtgtagaaagtttgggattaggggttagtttatggggaggggaggtagaggaaggattggaagttattcgttggaatgtaggtaggattatatatttatatataatataattatatattatatatgatatatagggttttttaaaaaaatggaaatattttatttttgttgatgttaaaagttatgtcgggtttgtaagtgggttgagtattttaggaaggggagtaaggaattggtaatagtggtttttttgtggggtagtatttgatagttgatggagtagggaggagggaggtagatttttttttgtgtttttttgttatattttatattttgttttatgagtatgtagtgtttattttaaaacgtattaaaatttaaaaaatataagtttattgtaaaaagttaaatattgtataagaggaaaatagattattaataattttatttttattagttgttttatcgtgtcgggggttatcgttttagtttttttttgtatgttagagcgtgtacgtttatatatatacgtatacgcgcgtatatatacgtatatgtatatatacgtacgtatatatatacgtatatgtatatatacgtatatatatatatgtatatatacgtatacgtatatatatatacgtatatatatatatgtatacgtttggtatatttgttgttttgtaatttgttttttgtttttttttttttttttttttttttttttttttttagatggagtttcgttgaaagtaattatattatttattcgaggtttttaaatatcgtttttattgatagttttttgatttttagtaaattttattaattttgttttattttttattattaatttaataggagaattttgtgattatggttttattttttcggttaaagtgttggagtgtaatggtttaatttcggtttattgtaattttttttttttagtttggtttaagtaatttttttgttttagttttttaagtagttgggattataggtgtttgttattatttttagataatttttgtatttttagtagagatagggttttattatgttggttaggttggttttgaatttttgattttaggtgattcgtttattttagttttttaaagtgtttgttaggattataggcgtgagttatcgcgttcggtttgtaatttgtttttttttttatttttagtgtttgagatatttttggtgtagagagagtttttataaatatgttgaatagtttgttttatttaatttttaaatattgtatagtaaatttttacgtgggtgtgataggagttatttaaattgttttttttttttcggatttttgggatgtttataatatttttttgttatagaaaatagtgatgatttttttattcgtgaatgtttaggaaaggttgtaggattttttcgttatagagaagtatgtttgaaaaatttttgttatatattgttaaattgtttttagtagggttatttcgatttgttattatattttcgtgtattggtagtaggaatcgtttttatatttttttgtggaaatttgtagttttttgaatttttggcgggtatgggcgtgcgttttttaggtgtggtacgcgtggtttatatattaagtttggtttagttttgttaagaaattagcgttttttagaataatggtttagttaggagggtggtgttgggtttttttttatcggtttgggtgtggaatcgcggattgcgtttttttaatttgatttggagagtggttgattgcgtgtgtagagttttgggggtgttggtttgggattgtgttattagttttgtaagtaagtaagggagcggaaaaggtcgggaaaggttttgtcgcgagtacgttgttaagagtttttagtagtagttcggtttaggattcgggttgcggcgggtgttatttttttaggggttagtaaggtagttagggtttaggcgtttgagtgaggggcgggagaggaggcgaggtagaaagtggattttttagcggaaaggttattttttttaaggtcgagtttagggaagtttttttttatagaatttaggtagggtgggaggtagggcgcgttcgtgttttttagttagttgtaggtgttttttgtttttagg

SEQ ID NO: 8 - DNA, 8162 bp, Artificial Sequence
  chemically treated genomic DNA (Homo sapiens)
tttggggatagagagtatttgtagttggttgaggggtacgagcgcgttttgttttttattttgtttgaattttataggaagggatttttttgggttcggttttggggaaaatggttttttcgttggaaggtttattttttgtttcgttttttttttcgttttttatttagacgtttgggttttggttgttttgttagtttttgagaaggtgatattcgtcgtaattcgagttttaagtcgaattgttgttgggggtttttggtagcgtgttcgcggtagggtttttttcggtttttttcgtttttttatttgtttgtaaagttgatggtataattttagattaatatttttagagttttgtatacgtagttagttattttttagattagattggaggggcgtagttcgcgattttatatttaagtcgataaagaaaaatttagtattatttttttggttaagttattgttttaaaaagcgttggttttttggtagagttgaattaggtttggtgtgtaaattacgcgtgttatatttgggagacgtacgtttatgttcgttaaggatttagagagttgtagatttttataaagaggtgtggaggcgatttttgttattaatatacgaaagtatagtggtaaatcgggatggttttgttgggggtaatttggtaatatgtggtaaaagttttttaaatatatttttttgtgacgaaaaggttttatagttttttttaaatatttacgaataagaaagttattattgttttttataatagggaagtattgtaaatattttaaagattcgaaagaaaggagatagtttaaatgatttttgttatatttacgtaagggtttattgtgtagtatttagggattaggtggagtaggttatttagtatgtttgtaggggttttttttgtattaggggtgttttaggtattggggataagaaagaaaataggttataggtcgggcgcggtggtttacgtttataattttagtaaatattttgggaggttgaggtgggcgggttatttgaggttagaagtttaaaattagtttggttaatatggtgaaattttgtttttattaaaaatataaaaattatttgggagtggtggtaggtatttgtagttttagttatttgggaggttgaggtaggagaattgtttgaattaagttgagaggaggaggttgtagtgggtcgagattgggttattgtattttagtattttgatcgggagaatggagttataattatagagtttttttattagattagtggtaggaggtaaggtaaggttagtgagatttgttagaagttaagaggttgttagtggaagcggtatttgaaggtttcgggtaagtaatataattatttttagcgagattttatttaaaaaaagaaaaagaaagaaagaaagaaagaaaaatagaaaataagttatagaataatagatgtattaggcgtgtgtatgtgtgtgtgtgcgtgtgtgtgtgtgcgtgtgcgtgtgtgtgtatgtgtgtgtgtgcgtgtgtgtgtatgtgcgtgtgtgtgtgcgtgcgtgtgtgtgtatgtgcgtgtgtgtgcgcgcgtgtgcgtgtgtgtgtgggcgtgtacgttttaatatgtaagaaaggattagaacggtagttttcgatacgatgagataattgatgggggtggaattattgatgatttgttttttttttatgtaatgtttgattttttgtaatgagtttgtattttttaaattttggtgcgttttaagataggtattatatgtttatgaaataaaatgtaaaatatagtaaaggggtatagaaaaaagtttgttttttttttttttgttttattagttgttaggtgttgttttatagaggggttattgttattagttttttatttttttttttgagatatttagtttatttgtagattcggtataatttttaatattagtagaaatagggtatttttatttttttaaaaaattttatatattatatgtaatatataattatattgtatatagatatatggttttgtttatattttagcgagtggtttttaattttttttttgttttttttttttataggttgatttttaattttaggttttttgtatagggaggagggatttgttggtattgagggtgttttaagtttggtttttttatggtttttttttatgttttgataggaggttgggaaagtttttttattgggatttttttagttttatgggttaggttttttttgttgattataatttaggagagaaggtttcgtttttttttcgagttttgtacggttaaattaaggtaggtagtttaggtgggaagagtttggtgagcgtgggacgggattggttttgtattttagtatcgttatttggaattgtggtttttgggttggacggtttttttaggattttttcgagagataggttaataaaggtgttattttatagagatgagtggatattattacgtcgtagttgtatttaaatgggagttgttgtagtatgtattgggggtttttttagagttcgtcgttttatattttatatttttgtatttcgttttttttatttgtgttagtgttgattttgttttttagtgatatttttttttttttttattgttttttatttttataaaagttttgtagtgatgtttatgaagaagaaacggttatgagtgtattttatagatgaggaaagggagattgagaaacgtttaatgttgtatttgattttatagttagtaggtggtatgttagggtttgaatttatatgtatttttgttagtagtttatgtttttagtattcggttttgttgttttttttttagttatggagtttgacggtttattagggttttttattttacggttattttggtgtttttgtttcgcggatttttgggatttttgttttttggtttgggggatggtagagttgttagaggtttaggaggatgttttagagatgatggttttagaggtagggattttttggagagatgatgtaggatttttgatatttagggtttcggttttgagtgtagattttatttagataagagaaaaaataaggaatgtagggaagaggattatttttgatatagtttttttcggtaattggggtttttggaacggtaagagttaagaggggacgtatttaaggattttgtttttcgtttattgagtttttggagtttttgtttaggaagtttgcgtgataagaaaaaaaaatatttaaatgtggggtgtggcgttttttggatttttgttttttatagtttaggttttggggattaggtttcgggttgtttgtttttgtttatttttgaaatgcgagaatgtttttgaaggtttgggtagggtatatttttaatttttaaaagagtttatgtttgttttgggcgtgggggttgttgattgatttagtttggtatggagtttttttagttttttagatttgtcgttgttagatgcggttttttgagttttttggttatataagatcggtagggtttagttacgaattatagtgagagtatgtagttttttcgaaacgtatttttagttatcgttgtttcgggttttttatattttttagtgtgtatagggttttattgagttagagattttaattttggggagttataggttggggatttttgatgggggtttttaatttataaatttgttttttcgttgaatagttgagaagagggttaagggtttgtgtggttatcgaaaattagagatgtttgggaaggaaggagtttggaaaagtcgtttttacgttgtttgattaatgttcgttgggtttttgttttgtattacgttgtggggaggaggtaggtgtggaatagattttcggttttttttattaggcgtttttcgttatttttattcgtttgtaggtagattgtttattagtatggggtttttgttttttattttattcgaggaaaatataaggtttcggttttggtttacgagttttgaggatgtgttttggtttttttgtttttttttatttggagttttttttttttatatttatttatacggttacgttttaatgtgttgtggaaaatagtataatgttgtcgtttttttttattattttttttttggagcgtttatattttgtttgttatttgttttttaatttttgatagttagaatttgatttgtttattgttgtaatttttatatagtatttatagtagatgtttaataaatatttattgattgataaaataaataggaaattttaaaataatgtgaatattgtagtaattaggtaggtagaggatgttagaggggttggggtgagagttcgtgggagggaatattatttgagttgagtgagaagtatttgggtaaggaatagtaagggggttggaagagtagaagtaaaggtatagaggttgggaacgttatgttacgaaaaagtgcgatgtgtttattgttgttagtaggaggtgtggaggtgaatgatttttttggggcgggggtttacggaggtttgtgggttaggttggttgtgggggtgtagggcgttgaggagattattagatagataaatgtttgttattttttgttttagagaattttttggatagggtatagtgtgagaaaggtttagtttaaaggttgtagtttttagtaatgtaggtaagaaatgacgagatttttaaataagattaatagaatgggaaatattttagaaatagtagaaagaagtatttgtaggatttcgtatttgtgtaggggttggattgggtggtaggtgtaaagtggggtgttttttgagaggggagaagatcgagtttgtgttagtttttttttttttttggtggtagtagttgattatttttgtaggtaatttttttttatttggtgagatgattaattaggtgttttttttaggttagttatgggttggggtgggttttttatgaggtttttttgatttttttgggaatttggattttgagtagagggtagaatgtaaggtcgaaggttattcggagttgattttttgtggtagcggtttttttttgggagaattatggaagtaattagtaaaagttagtaatatagtattgagtatacgaagtgattagaatagtgtttggcgggtcgagggtattttggaaaggttaggtggtgtgggtgttattaaaagtggtagtagtagtggtggaagcgttagagtaaggagtttaaaagtagtttaaatttacgaagaataaaatttttgtttgcgtgtttgggttttggttatagttttagtagtggtaaaagtgtgggagtgtgggttgtgttagaaatttgtagatatttgttttttagatttttttttttttttttttttttttttttttgagatagggtgttgttttgttgtttaggttggagtgtagtggtgttattacggtttattgtagttttgaatttcggtgtttaagcgatttttttattttgtgattataggaatttattattatgtttggttaatttttaaatgttttgtagagatgggttttattatgttgtttaggttggttttaaatttttgggtttaatttattttttcgttttagttttttaaagtgttgggattgtaagtatgagttaatttttgtaagttttaatattttatttttaatgttttatttttatttgggttgttatttatttttttttttttaggttattgtttttgttttttatttattttttttgagttaggtttagttgttttttttaagtggttgttagagagatatgcggacgataaggatttgagtatgttttttttttgatttatatttttgggtggtatttttttgttgttaggaagtttttttttatggtttgtgagtttttgtttggtttggtttttggttgttttgttagttttatttcgtattattttttattatttttattgtattttagtttgttggtattttttgatttaattaggtaattttttattataaggtttttgtatatgttgtttttgttttttgggatatttttttttttattttgtattagattaatttttatttatgtttagattttagtttttttgattttttttattttttaaataaaattttttttatttttaggaatttgttataatttgcgtttatatttttgtttgtgtgattatgtttttttttatttttttttggattggaatgtttataaaggtagagattttaatttttgtttagtattatattttggtataagggagatttttgaagatacggaagtagtttattatatttaattatttttttgatggaaaagtaattatttagtaagacgatttttagtaaatttatttaaagttagtaaaaaaagtgttgaatgaatgaatgaatgaatgaatagcgagtttgtttaaattttaaggaatatttagattagatatagttgttgggaggggaaattattttttttatacgagtagaaggagtttgggtaatatagagagatttatttttataaaaaataaaaaaaaggaaggaggttgggtgcggtggtttacgtttgtaattttagtattttgggaggttgaggcgggtagattatttgagtttaggagtttaagattagtttggttaatatggtaaaattttatttttattaaaatataaaaattagttggtcgtggtggtgtatgtttgtaattttagttattcgggaggttgaggtaggagaatcgtttgaatttgggaggtggaggttgtagtgagttaagattgcgttattgtattttaatttggatgagggtagagcgagattttattttaaaaaaaaaaaaaaaaaaaaattagttgggcgtggtggtatgtatttagttatttgagaggttgagcgggaggattatttgagtttaggaggtcgaggttttagtgagttgtaattatgttagtgtattttagtttgggggatagagtgattaggtagattttgttttaaaaaaaaaagagagagtagaaaggagaaaattaggtagtgggttttagggattttttcgttggttaaaagtgttatgatttaggaagataaatgttatatgtttttttttatgtgtgggagttaaataagtggattttatgaagatagagaatagatcggtggttattagggttgggaagggtggggaggtgggggaataaagagagtttgtttagtgcgtataaatatatatttaggtagaaataatacgatttagtgtttagttaggtacggtgatttatatttgtaattttagtattttgggaggaagaggcgggtagattatttgaggttaggagtttgagattagtttgggtgattaagtaagattttatttttataaaaaatgtaaaaatttgttgggcgtggtggtacgtatttgtagttttagttattcggggaagttgaggtgggaggatcgtttgagtttaggagttgaaggttatagagagttgtaatttagttatcgtgtttagttaagagtagttagtttgttataaagttttttgttattgttataaagtttttttttggagaggtatgaagttagtagaattggttgtgttcggggtaatttttttattgtgtttatattttttggggatttgtaggaaaggatttttggggtttttttatttttttatttgttgttagttatagtgttttgggttagagaagttgtaggtttgtagttagcggaggtgagtgcgagtaagggggagttttttttaagatgttgtagaggttttagtttttattttattttttttggatttttttgtttttaggaagttgtggtttttaggtttaggttttggtttttaggaagtttttgtcgagttaggataaagggtattttagcggggtagaaggtatgagtgttggttggaggggaagtgggtattagggttattttggttaagttagtttgttaggtaggatggtagtaaagtgtaagttatggtgagttaggtacgggtagttttatagtaggaatgttcggtttttttagtttaggcggaatttgtttgagttatcgtttggttgtagttttagttgtagagtttttgtagattagtttatatttcggtt

SEQ ID NO: 9 - DNA, 9951 bp, Artificial Sequence
  chemically treated genomic DNA (Homo sapiens)
tggttatggcgggggtcgtttttagatggtagatattagtattattatatagtatgatgagaaagtgtaatttttttgatttagttttgtgagtagttggaattataggcgtgtgtttttatatttagttgatttttgtatttttagtagagatggggttttattatattggtttaggttggtttcgaatttttgattttaagtgatgtattcgttttagtttttaaagtgttgggagtgggtttttcgagttttttaatttttttgagggattttaaatttttggggtttggtgtaatttttttttttttttgtttttttgggtttgggggttgtggcggttgttatggttgtttattttgggtttttttattatttgtgttgtattattaattttttgtatttaatgttttttatttaaaatatttggagagggtcgggcgttgtggtttacgtttgtaattttagtattttggttggttaaggaggattatttgagtttaggagtttaagattagttttaataaagtgagataaatttttttttttaatttatttttataaaaaatataaaaattagtttggtgtgatggtggatatttgtagttttagttatttaggaggttgaggtgggagaattgtttgagtttaggaggatgaggttgtagtgagttgagattgtgttattgtattttagcgtgggtgatagagtgagattttttaaataaataaataaataaaaaataaaaaaaataaaaaatagttttggaggtattaaattttgattgatatattttttttttttagaaaggatttttttttttaggtggtttatggagttgtttttggggagtttggagattatttaagaggttgatagggtggtttagataaatatattagggtgatttgcgggatagagatttgagtagggttagtatttttattaatttatttaggttgtaatagtgtatagttatatttttaggaaggggtggttagattttttcgtgtttattgtttgttaatgtttttttttataataagtttttatttttagtttttattatgaaaataatcgatgttttttgtagaaaagtaagtagaagagaataaatattgtttttaattggaattttttgaaataattttttggaatattgttgtttcgtattgtattgatataggagcgtgttgggtagtttacgtgattttttttatattatttttttggtatggatgtgattttataatattttaaatattaaagttaatggggatgatgattattgagtttggtttataggatggtgggaggtttttaggttggggtgtgttaaaggttttgtttagtgtttggtatagtaaatgtttaggtggttgttgttttttattgagatttgaggtttttgagagttggtggtaaagggtttatttagagttgaagattttagtttatttttgtgcgagggttttaggtattttggaagtatcgtgggtcggggagttaggttaggttggttgtggatttttatgagtttttgttattgtgtggtttagttggaaagtatggttaataatgtttgggaattgtgaaaattgtgtgaagtgtttgtatatagtaggtgtttagtaaaggtttgttgagtgcgtaaatgaataagtgattcgtatttatcgttgttcgtgagttttgattgtgttttgggttttgggtttttatagtttttaattttgtttttttaaggagttagggtgggtttagtttttaagattgttagggagggggtgggaggtagggttagggttttagggttaaggtttggggtagttatttttttaggagggtaaggagaggggtaggaggatatttatatgttttgagcgtttattgagaattaggtgttttgtcggtgtttttaggtcggttttcgttttattttcgtagtagttatgtgaggtaggtagagttagtttttattttatagttggggaaattgaggtttagtgaggggacgtttttttttaaggttattcgtgggtagatgaggtagtgagatgtttttgggtaggtttgaggttttgtgagttaggtttaggggcgtgtttttgagaagtgagggaatgaatgaatgaattatgaatggatgaatgattttatttgatgttatgtttatgttttgtttatatttttgttttagagtttggaaggtagtttttagatttttttagagggggtcgggtatttggaatggttatagtttcgggtttacgtgtatggaataatttgttttagttttataattatttatgttttattttatagatgggaaggtagaggtacggggggttaagatattaatttaggttatataggtaagtgataggattaggatttgagtttagattttatatttaacgttttttatgttaggtgttgagatttatgtttgtcgaatttttttatttatttatagatgttttcgggattgtagttagttttatttttatatgggaatattgaggtttaaagaggcgaagcgttagtttagtaaggaggaggtagggtaggcggggtcgtagttgtttggttcggagttttgagtaatttttttatttattttttttggttggtttgggttttggtagattttattttagagttggttttaaaagtgagtttttttggtgttttatttagagggttttttatttattttgggttttttaataaagatgggatttttaggttttattgagtttttggagttttgaggagtagtgaggggtatttaatttagagtggggagggtttagtttttttgggaggtgtgtggttttttttggggggagttttatttttagggaaggttaggagttttgtttcgggaggataggttttttcgggggtttttttttaggttgtttttgtatttatgataagttcggtttttgtgagttgggggaaattttttaatagttttttggttagggaggggattttcgggattttgaaatattttttttatttgttagtattcgttaagatgggtttttgatttgttgtgtggttttagattagtggttgttttttttgggttttatttttagttgagatttataggtttagtttttgtttagttttgtttggtattcgtttaatttggttgagttttagagaatggtagggttgggttgttatatgttgagttacgtgattggtagtggttgggggttttattttatatagaggataggggttttgtagttttttatttttattttaattatttaattacgggttatcggtgtgggtatggtttagaagattttatcgtttttttaggtaggtagggagttggcgggtggggggggttatgatgagtattttttaggtgttacgttggtttagaggtttcggggtcgggagttacggaggtttagggtattagggagatggtagtagcggtaggtttaggaaggggtatagaggaggttttttttttatatttgttattttgttttttgtttgtttatatttatagtagtttgtatattatttttatagtacgttggttttgataggtgtattcggggcgggttgggggtaggtagggataggtttaggtatagttgtttgtgtcgaatttgaggaagatcgggattataggaattattaaggcgatacgtggtattatgattacggttttaagtagagaggtaggtattttttttgggaggtagaggggatattcgaaacgggtgtagttttagttttggagtaagaagttttgttatatatacgttttatgtttatattttattttttttttgtttttattttttcgtttgtaaaatgttagatttgtagaaagataggttttatgaatggggcggtttatggggtggtgtggaggaatacggaagtatagggcgttgggagaggagtaggtatgaggtatggtttttaagatggtatttttagattttagttatttttgggtttgatttttttgttttgtagaaggggaaattgagttttgggtagggtgtagtaagataagttatagataaaatattttagatattggattaaagaaggaagaggtttatttagttgggagtattagtagatttgcgttaagagtcgagttttttgaaaaagatatttttggtttttttaaaggtttataattttaaggggtttacgtgaaagggtcgtgataaatcgagtaagttcggggaacgtgatcgggggttgtatgcgttagttaatagaatagaaagttttgtagtgtttttttatataatgtttggaatttatagataatataagtagtttaggttaggggttgatattattattatttttttttaattattagggttaggtggtggcgttaaggttttttggttattttttttatttttgtttttttttaattttttgttttttttttttttttttgttttgtaaattaggtaaggtggtaggaggagggtagtaggagtagtagtggttttattttttaggggaggtattgagggaaggttgggagtggggggtcgagatttttttgttattttgggttataatattttatataatattataatagaatataattaatataataatagttttttattttatatcgggatttttagggtttattgttttattttttttttttaggttggtttttagtttagtgtttagttttgttgtatagttttttttttttttttttaggttgttttttagttcggagtttagttttgttgtgtggttttagtttggcgttttttgggcgttgattttttttttgtggtttgggaggagatgtcgaggttttcgagggaggcggtggtgaaattttggtttgtagtttttagttcgtttagagttagagttaggtacgaggttagggtaatttcgttttatttttttttcggggattggttttgcgttggatattttttaatagtagggttattaggtagagcgggatagttaggaggaagggtagtttggtagagttttaggtagagtatttcggggaggttggggttgtagtgggttagtagtcgggttagagtttagtttagtaatttcgggttataggtagtttaggcgggtttagttatcggtagttgtatttagaggttattgtgttttggttgagtttatttgtttgtttgttgggggagaaagcggaaggaggagaggtagatttggggagtggtagcgaggtttcgggtatttttttggttagtaggtattttttcgttgttcgagttgggttgttatcgttttttttttttgggattttcggatattttttaagggaattaagggaatagttttgggtttagttgttttaggaaggattgtgcgttttttttttataggggttaagtattttttttagtaatagtcgttttttgggtattagtttgtatgtttagtgttgatgtagggatgtggttatgaatgattttgggaaagaattatttttagtaatggattttgttagggtttaagaaaggagtggttagttagtttcgtttcgtttgtaggaggtattttttatttcgggaattgtgttttattagggagtcgaggttgtttagtttttttgtgattcggggttgggttggttcgagttattaatgaggggatacgttggtttttggttttttaagggaggggttgttgagttttgggaggttttatgaaaatttagtttaaggttattaaaagataaaatgataatatatttagttatagattaaattggtttttatttatgattcgtgaattcggatagtttttattttataaaatggagtgagagtttttattaggtagtggtagagtagggggtttataaggtagaaaggaggaaatagaaaaataggaaatattaaatcgtttaatatcggatcgttgtagattgtttttttttaagcggattgtttttttttaaggggtaaggtagaggggatttgatgatgtcggtttaggtggattggaattttttgtttttcggagaaattggtttgtggttttgggttttgtttgtttttttaaagtttcggtttgatgatgtggtatttggtatgagtgtttttattttggtttggtttggtttgttggggtttagtataggagtttagtttaaaattatagttttttattatgtttgtttaatgaagttatattgtaggagattagaatcggagattttgcggtattgggtttgtgggttttttgaagttggtttagtgattttcgttttttggttgttttgatgggggttttttaggttttttatttattatgtttagtttttttgttattatatttttgtttttagttgggttttagggtgatgtttttgtttttttaatatttattttggattaaggtttttttaggtttttgttttaggggttttttttttgagtttttttttggtatattcgttttttatggatattgagtatttttcggggttttagtgtttgaattttttcgatagtggtatgggtgttataggtagtgtttaattttatagatgggaaacgtgaatataaagaggttaagtaatttgtttaaggtttttttatttatatatgtggttgttgtagtttaaatttaggttattgggtttttagattatgttatgttgggaggatgtttttagaaggtttatggtgtagatgaggaaattgaggtaggaagaatgagagaacgggtagagttttcgtttttttggaatttaatttatttgataggttagggtgtgaacgagtagggagtttttgtttagggacggtttttgttgtgaggttgggggtagcggttcggttagttatttattttttgtgatatgttagtttcgtttttttttattttgttttcggagtttgtgggtatttatagcgagtatttaggttggtatagtgtttagtatatgggtatttgagtattgtttttagaggttcgtggttttgagaggaagtggttggttttgttttggtttttaggttagaggaaatagtcgttatttttattattaaatgatgtggtaatttttttttattttagaagttgtaggtttgggttaaatgtattttaatttgtgatggggggttacgttttagagatttttgggtttattagtttttggattttagtggtttagtcgtaggaggtaagaggtagttttagattttataatttaagtagtgtggggagtggtagtaatagtgaggagggaggtcgaggaaatggaatttaaatagtaagagatttttttttatcggttattttttttatagttggtttatcggagtttatttagttttgggtttgtcgtttaggttttagtttagtgtttttttttttaaggatttggttgtttatttttaggggattgtgagggaggtgggagttgaggtggatagttttttgtttttttggatttgggttttttaatgtgaggagttgggtggtattaggtaagttttggttttttttgagttttagtttttattttttttagtggggtgaatagtggttttttagtgggcggtcgtggtggtgaaatgagcgagggtaggtatggggattatattttttataattttatattgtgggatgagtgtcgcgggggtgggtttgggggattttagtttagtgtttgatttaggagttttttattttgtgtgtttataatggttgtttagtattttcgggagataataggtttaggatttttttaattttaggtagaaggcggttttggttttttcgtttgttagggttttgttttgggtattttttgggggttttagtttagagtgagtgattcgtaggggtaatgttagggttggttgttttgtgggagagatgtgttttgtggttttggtgagttggttttagcgttgttaggagggttgttggaatgttttttgtagaattttattttttatagagttttcggtttatagtttattatttacgttacgtgttttgtatttttgtggtttttgtagagatttttataaagggtgagagaggtataggcgtggtttgtttttgattattggtagaagtttgaaggtgagagtagaatggagaaggatttaggagagtgcggagttgagggagataaatatttgtaggttatttagtaaaatatttagagttgatttttgtcgagtattttttgtgggtataatagtaaatgttttatgtagcgtgatgttatttaatttttataatgatattaggtgttattagtatttttattttatagatgaggaaatcgaggtagagaaggtgagtgatttgtttaaggttttataattagtaagaggtagagttcggagataggtttgatggtggttcgagaggttcgtttttggtttttgggttttagttttgttttcgtgacgagttattttttatggggattatggtgtttgttttgtgtgcgggttattgtttagttttttttaattagagtaggaagatggtgggtttagtttggttttataattattttagttgagggttggtttggggtttttgattaggtttttagtagtatattggtttagtagggttattttgtagatcggagtaggtttcgtttttaaggtggttatttaataattatttatagttttgcgtttatcgatgttgggttttgggtttagaatcgattgtgtggttttattattagttggtaggtgttattattatatcggtaatatgagaggttttaagtattaggttttaaataagtaggtatagaggggtttgttttttagtttaatgagggggaaataagggagatgtggatagggttgggaggtgggtagagtgtaattagatatttattatatggtataatttagaacgttggggagtagagttaaggggttattgtgatagtggatgagggtataatttgggtgggttgtttggaggaagtattagttaagttgagatttggaggaaagggattcggagagggaaggaggaaagggttattacgggtttttggtattaggtcgaggaacgagtgcgttagagtgttttttcgatgaattttaagtaaataggtagggttcgggggaatgtttaggtttttattttgtttgttagttttggttggtattagtacggaggtaggaacgttttttttttcgttttgatttttttttttatagttgtttttgttttttagtattatagtttcggtagggtgggtagtagggtttttaggaggttcgaggtgttttttttttttttttgaggaagttgaggtatagggagaagaggttattgtttattggtttggtttttttgggtagtgtttttaggttggggatagaggaagacggagaattttgtgtttggagtgttttaaggtggtggttatggtggtagtgagttattttttttatttattaagtttttgtttatattatttagattggtaggggtgaggttgtttcgtttttaggaggggtattagggtagggtagaggttatggtttggggttaatttttgtgcggtaggaagaagtatggcgttttgtttgtttgtttattttcgggggttgtggtggagtagttgtttttaagtttatatttagttttgtagtcgtttttaggtttatggtagaggggagtggtgcgagggtttttatgtgtgtttgggagtgtttattgttgggtgaaaggggttgtaggtagttttagtttttgtggggttatttgagtgggtttttgtgtgtgtataaggtagaggtgtttgtaagtttttgtgggtgtaggtaggttaggggtgtttagattttggggcggttgggtggtgtttatgaaggaggggtagttttggttatttagtttatgttattttatttggtagg

SEQ ID NO: 10 - DNA, 9951 bp, Artificial Sequence
  chemically treated genomic DNA (Homo sapiens)
tttgttagatggggtggtatgaattgggtggttagggttgttttttttttatgggtattatttagtcgttttagggtttgggtatttttgatttgtttgtatttataggggtttgtagatatttttattttatatatatatagggatttatttagatgattttatagggattgaggttgtttgtaattttttttatttaatagtgagtatttttagatatatatgaagattttcgtattatttttttttgttatggatttggaggcggttgtaggattgggtgtgggtttggggatagttgttttattatagttttcgagggtgagtaggtaggtagagcgttatgtttttttttgtcgtatagaaattaattttaagttatggtttttgttttgttttgatgttttttttggaggcggggtagttttatttttgttagtttgaatggtgtaagtaggagtttgatgagtagagggggtgatttattgttattatggttattattttggagtattttagatatagaatttttcgtttttttttgtttttagtttgggggtattgtttagggaggttaggttagtgggtaatagttttttttttttgtgttttagtttttttaggaagagggggagaatatttcgggttttttggaggttttgttgtttattttgtcggggttgtggtgttgggaggtagaaatagttgtgggggagaggattagggcgggggagagggcgtttttgttttcgtgttggtgttagttagagttggtaggtagggtaggggtttagatattttttcgagttttgtttgtttatttgaagtttatcggaggagtattttgacgtattcgtttttcggtttggtgttaaggattcgtggtgattttttttttttttttttttcgagttttttttttttagattttagtttggttgatgttttttttaggtagtttatttagattatgtttttatttattgttatagtggttttttgattttgttttttagcgttttgagttgtgttatgtgataaatgtttggttatattttatttattttttaattttgtttatattttttttattttttttttattagattgggaggtaggtttttttgtgtttatttatttgagatttagtgtttgaagttttttatgttatcggtgtaatgatggtatttgttagttaatgatgagattatatagtcggttttgagtttagggtttagtatcggtgagcgtaaggttgtgggtgattgttaagtggttattttgagggcgggatttgtttcggtttgtaggatggttttgttggattagtgtgttattgagagtttggttaggagttttaggttagtttttagttggagtgattgtggggttaggttgaatttattatttttttgttttgattgggagaagttgggtagtggttcgtatataggataggtattatggtttttataggggatggttcgttacgggagtaggattgagatttaggagttaagaacgagtttttcgagttattattaggtttgttttcgggttttgttttttattggttgtgggattttgggtaaattatttattttttttgtttcggtttttttatttgtgaaatggggatgttaatggtatttggtgttattgtgaggattaaatgatattacgttgtataaaatatttgttgttgtgtttatagaaagtattcgataaaggttagttttgggtgttttgttaagtagtttgtaaatatttattttttttaatttcgtatttttttgggtttttttttattttatttttatttttagatttttgttagtggttaaaggtaaattacgtttgtgttttttttattttttgtaagaatttttgtagaaattataaaaatgtaaggtacgtaacgtgaatggtggattgtgggtcgggagttttgtgggggatggagttttgtagggaatattttagtaatttttttagtaacgttgaaattaatttattagggttataggatatattttttttatagggtaattagttttggtattgtttttacgggttatttattttggattgaggtttttagggagtgtttagggtaggattttggtaagcggagaagttaaggtcgttttttgtttgagattggggggattttgggtttgttatttttcgagggtgttgggtagttattgtggatatatagaatagggaatttttgaattaggtattgggttggggttttttaagtttattttcgcggtatttattttatagtgtgaggttgtaaggagtgtgatttttatgtttgttttcgtttattttattattacggtcgtttattgagggattattatttattttattgaaggagatggaggttgaggtttagagagggttagagtttgtttgatattatttagttttttatattggaaaatttaaatttagaagagtagaaggttatttattttagtttttattttttttatagttttttggggatgggtagttaagtttttgggggaagggatattgggttggggtttggacggtagatttaaggttgggtggatttcggtaggttagttgtgggaggggtgatcggtgaggggaggttttttgttgtttggattttattttttcggtttttttttttattattgttgttattttttatattgtttaggttgtggggtttgagattgttttttgttttttgcggttgagttattgaggtttaggggttgatgggtttaagggtttttggggcgtggttttttattataggttgaggtgtatttggtttagatttgtagtttttggggtgggggggagttgttatattatttggtgatgaagatagcggttgttttttttggtttgggggttagggtaggattagttatttttttttaaggttacgggtttttaaaaataatatttaggtgtttatgtgttgggtattatgttagtttgggtgttcgttgtgggtgtttataggtttcgggaatagagtggggaggaacggggttgatatattatagggagtgaatggttggtcgagtcgttgtttttaattttatagtagggatcgtttttgggtagggattttttgttcgtttatattttggtttattaagtgggttggattttagggaaacggaggttttgttcgtttttttattttttttgttttagtttttttatttatattatgggttttttaagagtatttttttagtatggtatggtttgggggtttaatgatttgggtttaaattgtagtaattatatgtgtgagtggggagattttgggtaggttgtttgatttttttgtatttacgttttttatttgtaaaattgggtattgtttgtggtatttatattattgtcgggagaatttaagtattgggatttcgggaagtgtttagtatttatggaggacggatgtattagaggagggtttagggaggagatttttggggtaggggtttgaaggggttttgatttaaggtgggtgttggggagataaggatattattttgagatttaattgaggatagggatgtggtgatagagggattgaatatggtgggtagagggtttgggggatttttattagggtagttagaaggcggggattattaggttaattttaggggatttataggtttaatatcgtagggttttcgattttgattttttgtagtgtagttttattaaataaatatgatgagaggttgtgattttgaattgagtttttgtattaggttttaatagattagattaaattaaaatggaggtatttatgttaaatgttatattattaaatcgaagttttaaggaagtagatagagtttaaaattatagattagttttttcgggaagtaggagattttagtttatttgagtcggtattattaggttttttttgttttattttttagaaaaaagtagttcgtttagaaaaaagtagtttgtagcgattcggtattaggcggtttggtgttttttatttttttgtttttttttttttgttttatgaattttttgttttgttattgtttggtgggagtttttattttattttgtagaatggaggttgttcggatttacgaattatgaatagaagttaatttgatttataattaaatgtgttgttattttgttttttgatggttttaagttggatttttatgaggttttttaaagtttagtagttttttttttggggagttagggattagcgtatttttttattggtggttcgggttaatttagtttcgggttataaagaggttgaatagtttcggttttttgatggggtatagttttcgggatgagaagtgttttttgtaggcggggcggggttggttggttattttttttttggattttgataaagtttattgttaagaatgatttttttttagagttatttatggttatatttttgtattagtattgggtatgtaggttggtgtttaggaaacggttgttgttggaagggatatttgatttttgtggggaaggggcgtatagttttttttggggtagttggatttagagttgtttttttggtttttttggagggtgttcgggaattttaggaaaaggaggcggtggtaatttagttcggataacggaagggtgtttgttggttaggggggtgttcgggatttcgttgttattttttagatttgtttttttttttttcgtttttttttttagtaggtaggtagatgagtttagttaggatatagtggtttttgagtgtagttgtcggtggttaggttcgtttgggttgtttgtaattcggagttgttgagttggattttggttcgattgttggtttattatagttttagttttttcgggatattttatttgaggttttgttaagttgtttttttttttggttgtttcgttttgtttggtggttttgttgttaagaaatgtttaacgtagggttagttttcgggggaggggtggggcggagttgttttagtttcgtgtttgattttggttttgggcgggttggaggttgtaagttaagattttattatcgtttttttcgggggtttcgatatttttttttagattatagagaagaagttaacgtttagagggcgttaggttagagttatatagtagggttgagtttcgagttgaggggtagtttgaggaggaggaggagaggttgtgtagtagggttgagtattgagttgagggttagtttgaggaggaggagtggggtagtgggttttgggaatttcggtgtggggtggggaattattattgtattaattatattttattataatattatgtggaatgttatggtttagaatagtaaggaagtttcgattttttatttttagtttttttttaatgttttttttaaggaataagattattattatttttgttgttttttttttattattttgtttggtttataagataggaggaaagagagaaggtaaaaagttagaaaaaaatagaagtaagagaaatagttagaagattttggcgttattatttggttttggtagttaaaaaaaagtgataataatattaatttttgatttaaattatttgtgttatttgtaaattttagatattgtatgagaaagtattgtaaaattttttgttttgttagttgacgtatgtagttttcggttacgtttttcgagtttgttcgatttattacgatttttttacgtggattttttaaagttgtaagtttttaaaaaggttaagaatgttttttttagggagttcggtttttgacgtaagtttgttgatgtttttagttgaataaattttttttttttttaatttagtgtttgaggtgttttgtttgtggtttgttttgttatattttatttaagatttagtttttttttttgtaaaataaagaggttagatttaaaggtggttggagtttagaaatattattttagggattatattttatgtttgttttttttttagcgttttgtgttttcgtgtttttttatattattttatgggtcgttttatttatagagtttgtttttttgtagatttaatattttataaacgaggaagtgggggtagagagggggtgggatgtgaatatggggcgtgtgtgtggtagagttttttgttttagagttggggttgtattcgtttcggatgttttttttgttttttaggaggagtgtttgtttttttgtttaggatcgtggttatgatgttacgtgtcgttttggtggtttttgtagtttcgattttttttaagttcggtataggtagttgtgtttaagtttgtttttgtttgtttttagttcgtttcggatatatttgttagagttagcgtgttgtggggatgatgtgtaagttgttgtgggtgtggataggtaggggatagggtgataggtgtggaggaagagttttttttatgtttttttttgggtttgtcgttgttattatttttttggtgttttgggttttcgtagttttcggtttcggggtttttgggttaacgtggtatttgggaggtgtttattatggttttttttattcgttagttttttgtttatttgggagggcggtgaggttttttggattatgtttatatcggtggttcgtgattagatagttagggtgggggtgaaggattgtagagtttttgttttttgtgtgggatggagtttttagttattgttagttacgtggtttagtatgtgatagtttagttttgttattttttggagtttagttagattgagcgggtgttaggtagggttgggtaggggttgagtttgtaggttttagttgggagtgaggtttagagagggtagttattggtttaaggttatatagtaaattagggatttattttggcgggtattggtaggtgggaggggtgttttaggatttcgagggttttttttttggttagggagttgttgaagaattttttttaatttataggggtcgaatttgttatgaatgtaggagtaatttgggaggaggttttcgaagaggtttgttttttcgggatagaatttttagttttttttgggagtgaggttttttttaagggaggttatatattttttaggagggttgggttttttttattttgggttgggtgttttttattattttttaaagttttagaggtttagtagggtttgggagttttatttttgttgaggagtttagggtaaatggggagttttttgggtagggtattaggaggatttatttttggagttagttttggggtgaggtttgttaaggtttaggttagttagggggagtgggtggaggggttgtttagggtttcgggttagatagttgcggtttcgtttgttttgttttttttttgttgggttgacgtttcgtttttttgggttttagtgtttttatgtgagaatggggttgattatagtttcgggggtatttgtgggtgaatgagagggttcggtaggtatggattttagtatttggtatggagggcgttaagtgtgaggtttgggtttaaattttggttttgttatttatttgtgtgatttaggttagtgttttaatttttcgtgtttttgtttttttatttgtaaaatgggatataagtgattgtgaggttgaaataagttattttatgtacgtgggttcggaattgtgattattttaagtgttcggttttttttggaagggtttgagagttattttttagattttaggataggagtgtgggtagggtatgagtatggtattaggtggaattatttatttatttataatttatttatttatttttttattttttagaaatacgtttttgagtttggtttatagggttttagatttgtttaagagtattttattgttttatttgtttacgagtgattttgaaaagaaacgtttttttattgggttttagtttttttagttgtaaaatgggggttgattttgtttgttttatatggttattgcgagggtgaaacgagagtcgatttgaaggtatcgatagggtatttggtttttagtaggcgtttagagtatgtgaatgtttttttgtttttttttttgtttttttgaggaagtggttgttttaggttttggttttgaggttttggttttgttttttattttttttttggtagttttgaaggttggatttattttggttttttgaagaggtaaagttagaggttgtaggggtttagggtttaggatatagttagaatttacgggtaacggtgaatgcgggttatttgtttatttacgtatttaataaatttttattgagtatttattgtgtgtagatattttatataatttttataatttttagatattattgattatgttttttagttgggttatatagtgataaggatttatggggatttataattagtttggtttggtttttcggtttacggtgtttttaaggtgtttggagttttcgtataggaatgggttggagtttttagttttgggtgagttttttgttattaatttttaggagttttaagttttagtggaaagtagtagttatttgggtatttgttgtgttaggtattgggtagagtttttggtatattttaatttggggattttttattattttgtgagttagatttagtgattattatttttattggttttaatgtttaaaatattgtggaattatatttatgttagggaagtggtgtgaagggaattacgtgggttgtttagtacgtttttgtgttagtgtaatgcggggtaataatattttaagaggttgttttagggagttttagttgagagtaatatttatttttttttgtttgtttttttgtaaggaatatcgattatttttataatgagaattgaaagtaaaggtttattatagagaaaagtattggtaaatagtgagtacggggggatttggttatttttttttggggatgtgattgtgtattgttgtaatttggatgggttggtggaggtgttggttttgtttagatttttgtttcgtaggttattttggtgtgtttatttgggttattttattagttttttagatagtttttaggttttttaagagtagttttataaattatttaaaaaaaaaaattttttttggagagaggaggtgtattagttagggtttagtgtttttagggttgttttttgttttttttgttttttgtttgtttgtttgtttgagaggttttattttgttatttacgttggaatgtagtggtataattttagtttattgtagttttatttttttgggtttaagtaatttttttattttagttttttgagtagttggggttataggtgtttattattatattaggttagtttttgtattttttgtagagatgggttgggggggggggtttgttttattttgttgaggttggttttgaatttttgagtttaagtgattttttttggttagttaaagtgttgggattgtaggcgtgagttatagcgttcgattttttttaggtgttttgagtaggagatattgagtgtagggaattggtggtatagtataggtgatggaagagtttaggatgggtaattatagtaatcgttataatttttaggtttagaggaataaggggaggaagagattgtattaggttttagaagtttggggttttttagggaaattgagaagttcggggggtttatttttagtattttgggggttaaggcgggtatattatttgaggttaggagttcgagattagtttgggttaatatggtgaaattttatttttattaaaaatataaaaattagttgggtgtaggggtatacgtttgtaattttagttatttataaggttgagttaggagaattgtatttttttattatattgtgtaatgatgttggtgtttgttatttgagaacggttttcgttatagtta

SEQ ID NO: 11 - DNA, 12069 bp, Artificial Sequence
  chemically treated genomic DNA (Homo sapiens)
  unsure (390, 398)
tatgtttttaaaatatagaaataaaatatggatagaattaggaggaaaatttgtttaatttacgttttttttagaaataaataggttaaattggtaaaatagtaatatgataaaagatttgaataatagaattagtaaaattgagttaatggaaatatatatatatatatatatatgtggtagaaggaggtatgtgtttttgagtatatatgaaatagttataaaattgattatatattatgtattaaagtaagttttaagaaattttaggttaggtatagtggtttatgtttataatttttgtatattgagaggttgagttacgtggattatttgagattaggagtttgagattagtttggttaatatggtgaaatttatttttattanaaatatanaatttagttagacgtggttttgagtagtatatattgtattatatttgttgttttttattttttattttttttttatttttttttttaagtttttaaagtttattgtattatttttatgttttgcgtttttatagtttagtttttatatattagtgaaaatatacgatgtttggttttttatttttgagttattttatttagaataatagtttttaattttatttagattattgtaaatgttgttaatttatttttttttatagttgagtagtatttaaatatatatatatattattagtgtatatatatattatagtatgtatatatatattatagcgtgtatatatattatagtatgtatatatatgttatagcgtgtgtatatatatatatagatattatagtgtgtatatatatattatagtgtgtgtgtatatatatattatagtgtatatatatatatatgtattatagtatatatatatatagtattgtgtgtgtgtatatatatattatagtttttttggttatgaaatttttgtttaagttaatgtttagaagggtttttttaatgttattttttagaatttgtatagttttagtttttgggtttaagtttttaatttattttgagttgatttttgtgtaaggtgagagatgaggatttagttgtatttttttatatgtggttagtcgattattttaggattatttgttgaaaagggtgttttttttttattttatgtttttgtttatttgttgaagattagttgtttgtaagtatttgggtttatttttgggttttttattttgttttattggtttgtgtgtttagttttatatcgatatgttattgttttggtgattatggttttagagtatagtttgaaattaggtaggtagtatgatgtttttagatttgtttttttggtttagttttgtttttgttgtgcgggtttttttttggttttatatgaagtttagaattgttttttttaattttgtgaagaaagatggtggtgttttgatggagattgtgttgaatttgtagattgtttttggtagtatggttatttttataatattgattttatttatttatgagtatgggatgtgtttttatttgtttgtgttatttatgattttttttagtagtgttttgtagtttttttttagaggtttttcgattttttttttaggtatattttaaagttgttttgttttgtttttttgtttgtttttttgttatcgttaaagggattgaatttttgatttgattttttgtttggttgttgttggtggatagaagagttattgatttgtgtatattaattttgtatttagaaattttgttgaatttttttattagttttaggatttttttggaggagtttttagggtttttaaggtaaataattatattattagtaaatagggatagtttgattttttttttatcgatttagatgtttttattttttttttttatttgattgttttggttaggattgttagtattatgttgaagaggagtggtgagagtgggtatttttgttttgtttcggttttttgcgggaagttttttaattttttttcgtttagtattatgttggttgtggttttgttatagatggtttttattatattaagatatgttttttgtatattgattttgttgagggttttaattataaaaggatgttggattttgttaaatgttttttttgtatttattgagatgattatgtgatttttatttttaattttggttgtgtgatgtattatatttattgatttttttacgttaaattatttttgtatttttggtatgaaatttatttgattatggaggattatttttttgatatggtgttgaattcggttagttagtatattgttaaggattttagtatttatgtttattaaggatattagtttgttatttttttttttggttgtgttttttttcggttttggtattaggatgatgttggttttatagaatgaattagggagggttttttttttttttattttgtggaatagtgttaaaaggattggtattaatttttttttgattgtttggtaaaattttgttgtgaatttttttggttttggattttttttttgttggtaattttaaaattattatttttatttcgttgtttgttattggtttgtttagggtatttaattttttttgatttaaattaggggggttgtatttttttaggaatgtaattattgtttttaggttttttagtttatgtgtgtaaaggtgtttattatagttttgaatgtttttttatattttagtggtgttagttgtaatattttttgttttattttttagtgagtttattaggatttttttttttttttttttggttaattttgtaaatgatttattaattttatttatttttttaaagaataagtttttgttttatttattttttgtatattttttttgttttaattttatttagttttgttttaattttggttatttttttttttttgtttggtttgggtttggattgttttcgtttttttgttttttgaggtgtgattttagattgtttgtgtttttttagattttttgatgtaggtatttagggttatgaattttttttttagtatagttttagttgtattttagaggttttgataggttgtgttattgttgttatttagtttgaagaattttttaatttttattttgattttgtttttgatttaatgtttatttaagagtaggttatttaatttttagttatttgtatggttttgaaggttttttttggagttgatttttagttttattttatcgtggtttaagaatatgtttgatataattttattttttttttgttgtttaggttggagtgtaatggtgtgttttcggtttattgtaatttttgttttttaggttttagtaatttttttgttttagtttttcgagtagttgggattataggtatatgttattacgtttggttaattttttgtatttttagtagagatagggttttattatgttggttaggttgttttggaatttttaattttaagtgatttattagtttcggttttttaaagtgttgggattataggtatgagttatcgtattcgatttattttatattttaataattgttattgaggttgagtatattttaatttatttacgtttatttaggttttttgttagtttagtttaataaaataaaataaaatagtttattgagatagtatttatattttatataatttatttatttatagtgtataatttagtggtttggaggtagtgggtttttttagtggttataatttatttgttgtttttagatgggttttagtattttgttttgtatttttttttttatttcgaggtttttttttggtgttatattggtatttatatttttagttatcgaagattttagggttagggtttggttttaggttgtggttttcgttgggttgtttttagttataattaagggttattttagatgttttttttgtttatagggttgtatattttgttaagagattttttatagtttttagtagggcgtgtttttggttttaggttcgggggaaggtggggtggggatagagttaggttatttatgaaggatagtggtaggatttgagtttattttgttttttggaatttagaaggtgtttagtaaatatttgtggaaatattagcgggtaatattgaggggtattgattttgtgttaggagttgtgatttgttttttttatttttacgtttttttttgtgatttttttaagaattatggtaattaggtgttattgttattttcgaaaggtttagagacgttaagtaatttatttacggttgtatagtaaataaataaattaatgaataatgcgttattttagagttataggtgtcgtcgtttattaagggtttttttgtaaagatttgagtttttttttttgttttgagtatgttagttgggtatattgagagtggaaatagagttatagttgtttattttgatttgtgaagtttgaagagtgaggataggagaggagggagatgaagatttagtatagagattttaggaggggttatggggggtatgggattattgtggttggggtttgggaggattttttggcgaaggtagtatttgttattaggattttgttgatatttttattttgtgatttttttttggggttttttttttttgattaggtaattttttgttagtttattttaggaaatatagagtaaagttttagatagttttgatttgtttaatttgtttttaagtcggttgtgtagtgtggtttttgggggtagggttttggaagaatagggtagatatcgagtagttataggttttggtagtgagataagggtaggtatgggaattgggaggtgtagttttgttttacgtttgttgggtaatattgagtattattttattgattattttattgttaggcgtgggtacgggagttggtttgggagttgttagttttttgggaggatcgtagttagtagagtagggttgaggtttgggggtaggagtagagtttgcgtatttggaggtagtatgtttaagaaagggagtggaggtgtagcgaaggatttaggggtagagtttacgttgggttatgtggggttataggggtgaggggcgggtagagggagtttagggtaaaggatattggtgggaattaggggtatggagggaaggggatgtgtgtttatggttcgtgggttagggggtaagtttattaaggggtttatggttgtaggggttatgggtacggggtttgtttaggagagggaggtgggtgttggtgttttttgagttttattttgttttttggtaggtttttgggaagtagttatagaaatgaagtttgttttttaggagttttagggatggggatagatttcgttttttttttgaggagtttttaggttagaggagaaggtagttttgtggatagataaggattgggtcgggggtattagggttgtgattaggaggtgtcggagaatcggggattggaagtagagagatttttggtagttgaagcgaaagtcggatttttggttttagatgttaaaagtaatatgtattgtttgtttttggttttagaaatattatattcgtatttagaaagtttggaagttgtaggaagatgttgagaagatagtgaaaggtacgaggtatatattggtatatggtgttataaggttggtgtgaggagaggggttggggggttttttttttcgtattgaggttgtgaggagggtaaattaagtcgtttttgggagtttcggtttttttgtttttttaattgggtaataataatagttgtgaggtttagatgagatgtgtatgttagttatttggttttagatgttagttttgatttttttttgggttttgtattaggtatggttattgtaagggaatgagtttttttttatatgataggtttattaggttttatttttttgtgtgttttattttttagtatttgtttttatagggtttttgtatacgttggttcgttttgtttagattatttggttttttaagagggttttttttaagggtttttcgtagtagttagagttaggggtggggtttttgggtatttttggaagaagttttgttttatcgattatgtttgtaatgatattgttttcggtgttattgtttcgtgtgtagattgtgagttttatgggggttggttaagtttgggtggttatttatggatttaggtttagttaggaattgtttggtgagtagttagaggtttttagtgtaaatttagaaaatttgagacgggttttagttaatttataaagtttattttgtttgtaattttagtattttgggaggtcgaggcgggcggattacgatgttaggagatcgagattattttggttagtacggtgaaatttcgtttttattaaaaatataaaaaataagttgggtgtggtggcgggtatttgtagttttagttattcgggaggttgaggtaggagaatgacgtgaattcgggaggcggagtttgtagtgagttgagatcgtattattgtattttagtttgggtaatagagtgagatttcgttttaaaaaaaaaaaaaaagaaaagaaaagaaaagaaaagaaagaaagaaagtttattttgtggttaggcgtggtgatttatgtttgtaattttagtattttaggaggttgaggtaggtgtattatttgaggataggagtttgaaattagtttggttaatatggtgaaattttgtttttattaaaaattataaaaattagttgggtatgggggcgtatgtttataatattagttattcgggaggttgaggtaggagaattatttgaatttgggaggtagaggttgtagtgagtcgagattatgttagttgtattttagtttgggtgatagaatgagattttattttaaaaaaaaaaaaaagttaattttgttaaggttgaggacgtgtatttgtgatatagtttggggatgttttgatagtatgtgtttaaggtggtcgggatatagtttggtttatatattttagggagataggagatagtaattaatatatgtaagaaggttaggtacggtggtttacgtttgtaattttagtattttgggaggttaaggtagggattatttgaggtcgggagtttgagattagtttgattaatatggtgaaattcgtttttattataaatataaaattagtcgggtatggtggtaggtatttataattttagttatttagttattcgggaggttgaggtaggagaatcgtttgaattcgggagatggagattgtagtgagttgagattttattattgtattttggtttgggtaataagagagaaagtttgttttaaaaaaaaaaaaaaaatatatatatatatatatatatatatatatatatatatatatatataaaatatatatatatatatatatatatatatatatatatatatatatatatatatatatatatgaagtatatcggttttatttagaaaggtagggatagtttgaagtagggggtgggggtgagggttggggtagtttttaggttataggtaggtgagagattgtatttttttgagtttttgatgagtttttttaaaggaggtaattagaatgtgtatttatttcggtgggtagaggggtggttgtgaataaaatgagaggtaggggttcgtacggtggtttatgtttgtaattttagtattttgggaggttaaggtgggcggattatttgcggttaggagtttaagattagttttaatatggagaaattttatttttattaaaaatataaaattatttgggcgtggtggtgtatgtttgtaattttagttattcgggaggttgaggtagaagaattatttgaatttgggaggtagaggttgcggtgagttgagatcgtagtattgtattttagtttgggtaataagagcgaaatttcgttttaaaaaaaaaaaaaaagggggggaggtaggttggttttgattagtttttagtttgaattttttttttagtttattgattttgggggtttaagatattttttttttatattagttagttttgttttagtaagcgttcggatttttgttttgtagtaggtgggcgagataagaaagtattttgtatgagaggtagggtttgggtttagttttagtttttatttgtttttttattcgttaggtagatgttgttggtttcgtgattattttatcgagtattagatgtgtatatgtgaggataggcgacgattgtttagaaagggtaggggtttttttgttttatttgttttatttgggaaagttgtgattacgttgaggttaggtttttgggatgaatattaggatatttgtgtgttatagtttattttagatttttttaattcgggttttgatttaggtcggaggcggttatttttttaaaggtattagggagttatggaagaggttagagttgagttgatgtggttaggagttgtttgagcgtcgggtggaggttgttgacgttcgtatgttaggtaaagttttgggttagggttttggaatttgggatttggaagcgttttaggttaatatcgttcgttattagagaagggtttaggttttatttaggttttagtttaagggtttgagtaaagatagtagatgaatatttgtagagttttgtatgttgcgtttttttttaggtttttatgtaggggggtcgtatattgagtgtgggggttttgtgttaggaatgtgattacgttgtttaggggagggaggcggtatttgtaggtgtggttaggaaggtgtttagtatggttttttgtttttttatattttttagttgggatttgagtcgggtaggggttgttttttttattttgttatttataagatacggatttttgttattggtttagttggttttgtttatgggcgagtattgtttttgtattatatatgataagaatgtttggtgcggtgtaagtgtagatggggttattggtttttaggatatttattggggatgttaaggttttgtttattatttatttttattgtttttagtaatgcgggtttgaggtagtagtttatgtacggttttgtgatttgtagttgagggttgagattatttaagtttatacgtagatatatatacgatatatatggatatagatatttatatatatatagatatatatggatatatatatttatacgtatatagatatttatatatatatagatatacgtggatatatatatttatatatatatagatatttatatatatatagatatacgtggatatatatatttatatatatatagatatttatatatatatagatatacgtggatatagatatttatatatatatagatatttatatatatatatagatatttatatatatatagatatttatatatatatagatatatgtggatatatatatttatatatatagagatatttatatatatatagatatttatatatatatagatatacgtggatatatatatttatatatatatagatatttatatatatatagatatacgtggatatatatatttatacgtagatatttatatatatatagatatacgtggatatatatatttatacgtagatatttatatatatatagatatacgtggatatatatatttatatatatatagatatttatatatatatagatatacgtggatatatatatttatatatatatagatatttatatatatatagatatacgtggatatagatatttatatatatatagatatttatacgtatatagatatttatatatatatagatatttatatatatatagatatatttatatatatatagatatatatggatatatatatttatatatatataatatttatatatagatatatatggatatagtatttatatatatatagatatatagatatatagatatttatagatatataggtattgatatatatatagatatttatatatacgtagatatatagataggtttgttttatgggtttttatgtttgtgggatatttgtttattttgttgatttttgtgtatatattgcgttatattttatgatttttatttagtgttattggtgtcgttggttttatatatacgtagatattgtagatttagagatttttatagatatatcggcgtgatatatacgtagatatttatatatacgtagatatatagttatttatatataaatttttatatatatatagatatttatatatatatagatatatatggatatatatatttatatatatatagtatttatatatagatatatatggatatagtatttatatatatatagatatatagatatttatagatatatagatattgatatatatatagatatttatatagatatagatatatagatatttatatataaatatttatatatatatatagatatttatatatatatagatatatatatatagatatttatatatagaaaggtatataaagatatagatatatatatagttatatatatgaagatgtatagaatataaagatatatagatatataaagaaatatagatatttatataaagatatatagatatataaagatatacggatatacgaagatatatagatatttatatacgtagagatatagatatttatatatataaagagatatagatatttatatatatatatatatatagatatttatatatataaagagatatagatatttatatatatatatatatatttatatatatagatttttatatatatatagatatatagtatttatatatatatagatatttatatatataaagatatatagtatttatatatatatagatatatatagatatttatatatataaagatatatagtatttatatatatatagatatatatagatatttatatatataaagatatatagtatttatatatatatagatatatatagatatttatatatataaagatatatagtatttatatatatatagatatatatagatatttatatatatataaagatagatagttatatatatatatatatatagatatataaagatataaagttatataaagatatatagatataaagaaatatatagatatacggatatataaagatatatatagatatacggatatataaagatataggatttgcgtattatttttgagtttttgggttgggatgtttagaatttcgttgttaggtgtttggtaatttttttgagtgtttttttgagtttttttttttatttttagggttttgatttttttttttttttagattttattggggtttttttgggtttttaggttaaagtttagaggggtttatgttttggggtagttttagttttgttaatttatttttatttgtatttgtgtttatttatattagtttcggagtttttttttttgtttttgtttttttttacgattagtagagtgttattttttttttagagtaggtgttaaattttttttagggttagggtatgttatggttttagtttttttatttgcgattttaaaattttgtgatttttgaagtaaagaatttttcgagtttttcgtttagttttagaagggagggaggtttaggggagagttttgttttatttgagtggtttgggtgtaggggtggtaaggtgttagcgtgggtgggtgtgtgtttgcgtaaggaggggaggtgtagggaagagttgggatggtgggtagtagggttattcgaggtgtgtgtgttgggtttttagggtgggcgtttaggagggggattttttttttggagtaggggaggttaagtttagggtttttttttatgggtatatttgggaggtaggtgagttgggggtggtgtaggtagttttagtttcgtggggttattcgagtgggtttgtgtgtgtatgaggtggggtgtttgtgagtttttatgggtgtaggtggggtaagggtgtgtagattttggggtggttggagggtgttcgtgaaggaggggtagttttggttatttagtttaagttattttattcggtagg

SEQ ID NO: 12 - DNA, 12069 bp, Artificial Sequence
  chemically treated genomic DNA (Homo sapiens)
  unsure (11672, 11680)
tttgtcggatggggtggtttgaattgggtggttagggttgttttttttttacgggtattttttagttattttagggtttgtatatttttgttttatttgtatttatgggggtttatagatattttattttatatatatatagatttattcgaatgattttacggggttggggttgtttgtattatttttaatttatttgttttttaggtgtgtttatgagggagggttttgggtttgattttttttattttagggaggggattttttttttggacgtttattttggaagtttaatatatatatttcgggtgattttgttgtttattattttagtttttttttgtattttttttttttgcgtagatatatatttatttacgttggtattttgttatttttatatttagattatttagatggaatagagtttttttttgggttttttttttttttgggattaaacgagggattcggagggttttttgttttagagattatagagttttgaggtcgtagatggggaaattgaagttatagtatgttttagttttgaggagggtttggtatttgttttggggagggggtggtattttgttggtcgtagaaggaagtagaagtagaggagagagtttcggggttggtatgggtgggtataggtgtaggtgggggtaggttggtagagttgagattgttttagggtatgaatttttttgggttttagtttgagggtttaagggaattttagtggggtttggagaggaggaaggattaggattttgggggtgggggaaggggtttagggggatatttaagaggattgttaggtatttagtaacgggattttgagtattttagtttaggggtttaagaatggtgcgtaaattttgtgtttttgtgtattcgtgtgtttgtgtgtgtttttgtgtattcgtgtgtttgtgtgtttttttgtgtttgtgtgtttttgtatagttttgtgtttttgtgtgtttatgtgtgtgtgtgtgtatggttgtttgtttttgtgtgtgtatgggtgtttgtgtgtgtttgtgtatgtatgggtattgtgtgtttttgtgtgtatgggtgtttgtgtgtgtttgtgtatgtatgggtgttgtgtgtttttgtgtgtatgggtgtttgtgtgtgtttgtgtatgtatgggtgttgtgtgtttttgtgtgtatgggtgtttgtgtgtgtttgtgtatgtatgggtgttgtgtgtttttgtgtgtatgggtgtttgtgtgtgtatgggtgttgtgtgtttgtatgtgtatgggagtttgtgtgtatgggtgtgtgtatgtgtgtatgggtgtttgtgtttttttgtgtgtatgggtgtttgtgtgtgtatgtgtatatgggtgtttgtgtttttttgtgtgtatggatgtttgtgtttttgcgtgtatgggtgtttgtgtgttttcgtgtgttcgtgtgtttttgtgtgtttgtgtgtttttgtgtgggtgtttgtgtttttttgtgtgtttgtgtgtttttgtgttttgtgtatttttatgtgtatggttatgtgtgtgtttgtgtttttgtgtgtttttttgtgtatgggtgtttgtgtgtgtgtgtttgtgtgtgtatggatgtttgtgtgtgtgtatgggtgtttgtgtatggatgtttgtgtgtttgtgtttgtatgggtgtttgtgtatgtattagtgtttgtgtgtttatgggtgtttgtgtgtttgtgtgtgtatgggtgttgtgtttatgtgtgtttgtgtatgggtgttgtatgtgtgtgggtgtgtgtgtttatgtgtgtttgtgtgtgtatagatgtttgtgtgtgtataggagtttgtgtatggatgattgtgtgtttgcgtgtgtatgagtgtttgcgtatgtattacgtcggtgtgtttataagggtttttggatttgtagtgtttgcgtgtgtataagattagcgatattaatagtattgaataggagttataaagtataacgtagtgtgtgtataaaggttaatagagtaaatagatattttataaatataagagtttatgagataagtttgtttgtgtgtttgcgtgtgtatgggtgtttgtgtatgtattagtgtttgtgtgtttatgggtgtttgtgtgtttgtgtgtttgtgtgtgtatgggtgttgtgtttatgtgtatttgtgtatgggtgttatatgtgtatgggtgtgtgtgtttatgtgtgtttatgtgtgtatgggtgtgtttgtatgtgtatgggtgtttgtgtgtgtatgggtgtttgtgtgcgtatgggtgtttgtgtgtgtatgggtgtttgtgtttacgtgtgtttgtgtgtgtatgggtgtttgtgtgtgtatgggtgtgtgtgtttacgtgtgtttgtgtgtgtatgggtgtttgtgtgtgtatgggtgtgtgtgtttacgtgtgtttgtgtgtgtatgggtgtttgcgtatgggtgtgtgtgtttacgtgtgtttgtgtgtgtatgggtgtttgcgtatgggtgtgtgtgtttacgtgtgtttgtgtgtgtatgggtgtttgtatgtgtatgggtgtgtgtgtttacgtgtgtttgtgtgtgtatgggtgtttgtgtgtgtatgggtgtttttatgtgtatgggtgtgtgtgtttatatgtgtttgtgtgtgtatgggtgtttgtgtgtgtatgggtgtttgtgtgtgtgtatgggtgtttgtgtgtgtatgggtgtttgtgtttacgtgtgtttgtgtgtgtatgggtgtttgtgtgtgtatgggtgtgtgtgtttacgtgtgtttgtgtgtgtatgggtgtttgtgtgtgtatgggtgtgtgtgtttacgtgtgtttgtgtgtgtatgggtgtttgtatgcgtatgggtgtgtgtgtttatgtgtgtttgtgtgtgtatgggtgtttgtgtttatgtgtgtcgtgtgtgtgtttgcgtgtggatttgagtaattttagtttttagttgtaggttatagggtcgtgtatgggttgttgttttagattcgtattgttgagggtagtgggggtgggtggtgagtagggttttggtatttttagtgagtgttttggaggttagtggttttatttgtatttgtatcgtattaggtatttttgttatatgtgatgtagggatagtgttcgtttatggatagagttagttgaattaatggtagaagttcgtgttttgtgaatgataagatgaggagagtagtttttgttcggtttaggttttagttgaagaatgtgaggagataggaagttatgttgggtatttttttggttatatttgtagatgtcgttttttttttttgggtagcgtgattatatttttggtataggatttttatatttagtgtgcggtttttttgtatgagggtttggaggaggacgtagtatatagggttttgtaaatatttatttattgtttttgtttaagtttttgggttagaatttgggtggggtttgggtttttttttggtagcgggcggtattggtttggagcgtttttaggttttaggttttagggttttgatttaaagttttgtttggtatgcgagcgttagtagtttttattcggcgtttaagtagtttttggttatattagtttagttttaattttttttatggttttttggtgtttttggagggatgatcgttttcggtttgaattaagattcggattggaggagtttgggatgagttatggtatataggtgttttgatgtttattttaggaatttggttttagcgtggttatagtttttttaggtgaggtaggtggggtagaggaatttttgttttttttgggtagtcgtcgtttgtttttatatgtgtatatttggtgttcggtgaaataattacggagttagtagtatttgtttgacggatgaggaaatagatgggggttggagttggatttaagttttgttttttatgtaaggtgtttttttgtttcgtttatttgttgtagggtaggggttcgggcgtttgttggggtagggttgattggtgtgaaaggaaaatattttggatttttaaaattagtaagttaaaaggaaaatttaagttggaaattgattagggttaatttgtttttttttttttttttttttttttggaacggagtttcgtttttgttgtttaggttggagtgtaatgttgcgattttagtttatcgtaatttttgttttttaggtttaagtaatttttttgttttaatttttcgagtagttgggattataggtatgtattattacgtttaaataattttgtatttttagtagagatggggtttttttatgttgaggttggttttgaatttttgatcgtaggtgattcgtttattttggttttttaaagtgttgggattataggtatgagttatcgtgcgggtttttgttttttattttatttatagttatttttttgtttatcgagatagatgtatattttgattgttttttttggaaaggtttattagaaatttaaaagaatgtagttttttatttatttgtgatttggaagttgttttaatttttatttttattttttgttttaagttgtttttgtttttttggatggaatcgatgtattttatatatatatatatatatatatatatatatatatatatatatatatatgtatgtatgtattttgtgtgtgtgtgtgtgtgtgtgtgtgtgtgtgtatatatatatgtattttttttttttttttgagatagatttttttttttgttgtttaggttagagtgtagtggtgggattttagtttattgtaatttttatttttcggatttaagcgatttttttgttttagtttttcgaatagttgaatagttgggattataggtgtttgttattatgttcggttaattttatatttgtagtagagacgggttttattatgttggttaggttggttttaaattttcgattttaggtgatttttgttttggttttttaaagtgttaggattataggcgtgagttatcgtgtttggtttttttatatatattgattgttgttttttgtttttttaaagtgtgtaaattaagttgtgtttcgattattttgggtatatgttgttaggatatttttaggttgtgttataggtgtacgtttttaattttggtaaaattaatttttttttttttttaagatggagttttattttgttatttaggttggagtgtaattggtatgatttcggtttattgtaatttttgttttttaggtttaaatgatttttttgttttagtttttcgagtagttggtattataggtatgcgtttttatgtttagttaatttttataatttttagtagggataggattttattatgttggttaggttggttttaaatttttgtttttaagtgatgtatttgttttagttttttaaagtgttgggattataggtatgagttattacgtttggttataaaatgaattttttttttttttttttttttttttttttttttttttttttttttttgagacggagttttattttgttgtttaggttggagtgtagtggtgcgattttagtttattgtaaatttcgtttttcgggtttacgttatttttttgttttagtttttcgagtagttgggattataggtgttcgttattatatttagtttattttttgtgtttttagtagagacggggttttatcgtgttagttaggatggtttcgattttttgatatcgtgattcgttcgtttcggttttttaaagtgttgggattataggtaaaataaattttataaattaattgagattcgttttagattttttgggtttatattggggatttttggttgtttattaggtagtttttgattggatttgggtttataggtgattatttagatttggttagtttttatggagtttatagtttatatacggaataatgatatcggaaataatattattataaatatgatcggtggggtagggttttttttagaggtgtttagagattttatttttggttttgattgttgcggggaatttttaggggaggtttttttggagggttaggtgatttggatagggcgaattaacgtgtgtaaaagttttgtgggggtagatgttgagaaataagatatataggaaggtgaggtttgatggatttgttatatggagagggatttatttttttgtagtggttatgtttggtgtagggtttagaaagaagttagagttggtatttggggttaggtagttggtatgtatattttatttgagttttatagttattattattatttagttggaaggatagggaaatcgaggtttttagagacgatttgatttgttttttttatagttttagtgcgaggagggaggttttttagtttttttttttatattagttttgtgatattatgtgttaatgtgtgtttcgtgttttttattgtttttttaatatttttttgtagtttttagattttttaaatgcgaatgtagtatttttagaattagaaataagtaatgtatgttgtttttaatatttgaaattaaagattcgattttcgttttaattgttaagaatttttttgtttttaattttcgatttttcggtattttttgattatagttttggtgttttcgatttaatttttgtttgtttatagagttgtttttttttttaatttgggagttttttaaagggaggacggggtttgtttttatttttggggtttttggggaataggttttatttttgtggttgttttttaggagtttgttaaagggtaaagtgaggtttagaagatattagtatttattttttttttttgagtaagtttcgtatttatggtttttgtagttataggttttttggtgggtttgttttttgatttacgggttatgggtatatatttttttttttttatgtttttggtttttattagtgttttttattttgagttttttttgttcgttttttatttttgtggttttatataatttagcgtgggttttgtttttgggtttttcgttgtatttttatttttttttttggatatgttgtttttagatgcgtaggttttgtttttatttttaggttttagttttgttttgttgattgcgatttttttaggagattggtagtttttaaattaattttcgtgtttacgtttggtaatggggtaattaatggggtgatgtttagtgttatttaataggcgtggggtagggttgtattttttaatttttatgtttatttttgttttattgttaggatttatagttgttcggtgtttgttttgtttttttagggttttgtttttagggattatattgtatagtcggtttgggaataggttagataagttaaggttgtttgaggttttgttttgtgttttttggaatgggttagtagggagttatttgattaggaaaaaagaattttaggggaaggttataggatgaaaatattagtaggattttggtggtaaatgttgttttcgttaggaagtttttttaggttttagttatagtggttttatgttttttatggttttttttagggtttttatgttaaatttttatttttttttttttttgtttttattttttaggttttataggttaagatgagtaattgtggttttatttttatttttagtgtgtttagttggtatatttagggtagaggaaggggtttagatttttgtagagagatttttgatgggcgacggtatttgtagttttaggatggcgtattgtttattggtttatttatttattgtgtaatcgtgggtaggttatttaacgtttttgagtttttcggaagtaataataatatttaattgttatggtttttgagagggttatagagggagacgtgagaatggaaaaggtagattatagtttttggtataaaattagtgttttttaatgttgttcgttaatgtttttataagtatttgttgagtattttttaggttttagggagtagaatgagtttaggttttgttattgttttttatggatggtttgattttgtttttattttattttttttcgagtttgagattaaggatacgttttgttgagggttgtagagagttttttggtagagtgtgtagttttgtgggtaggagggatatttgagataatttttggttgtgattggagatagtttagcggaggttatagtttgagattaagttttggttttggaattttcggtagttaaagatgtaaatgttaatgtgatattaggaagggatttcgggatggggaagggaatatagggtagaatgttaaggtttatttaagagtagtagatgggttatggttattggggaggtttattgtttttaaattattgaattgtatattgtaaatgggtgagttgtatgggatgtgaatgttattttaataagttgttttgttttgttttgttaaattgaattgataagaagtttgaatagacgtaaataaattaaaatatgtttaattttagtagtaattgttaaaatgtaaaataggtcgggtgcggtggtttatgtttgtaattttagtattttgggaggtcgaagttggtggattatttgaggttaggagttttagaatagtttggttaatatggtgaaattttgtttttattaaaaatataaaaaattagttaggcgtggtggtatgtgtttgtaattttagttattcgggaggttgaggtaggagaattgttggaatttaggaagtagaggttgtagtgagtcgagagtatattattgtattttagtttgggtaataagagaaaaatgaaattatattaggtatgtttttagattacgatggaataaaattggaaattaattttaaaaagaatttttaaaattatgtaaataattggaaattaaataatttgtttttgaatgagtattgggttaaaaataaaattaagatggaaattaaaaaattttttaaattgaatgataatagtgatataatttattaaaatttttgggatatagttaaggttgtgttaagaggaaagtttatagttttaaatgtttatattaaaaagtttgaaagagtatagataatttaagattatattttaaggaatagaggaacgagaataatttaaatttaaattaagtagaagaaaggaaataattaagattagagtagaattaaatgaaattgaaatagaaaaaatatataaaaggtaaatgaaataaaaatttgttttttgaaaagataaataaaattgatagattatttgtaagattaattaagaaaagaagagagaaaattttaataaatttattgagaaatgaaataggagatattataattgatattattgaaatataaaagagtatttaaggttatggtgaatatttttatatatataaattagaaaatttagaagtaatggttatatttttggaaaaatataatttttttagtttaaattaggaagaattagatattttgaataggttaataataagtagcgggatggaagtggtaattttaaaattattaataaaaaaaaagtttaggattagaaggatttatagtagaattttattagatagttaaagaagaattggtattaatttttttgatattattttataagatagagaaagaaggagttttttttaatttattttatgaagttagtattattttaatattaaaatcgggaaaggatataattaaaaaaggaaatgatagattgatatttttgatgaatatagatgttaaaatttttaataatatattagttaatcgaatttaatattatattaaaaagataattttttatgattaagtgggttttatattagagatgtaggggtggtttaacgtaggagggttaataaatgtgatgtattatataattagaattaaaaatgaaaattatatgattattttaatagatgtagaaaaagtatttgataaaatttagtatttttttatgattaaaatttttagtaaaattagtatataagggatatattttaatgtaataaaagttatttatgataaaattatagttaatataatattgaacgggaaaaagttgaaaggtttttcgtagagaatcggaataagataaggatgtttatttttattatttttttttaatatagtattggtagttttagttagagtaattagatgagaaaaagaaataggggtatttgaatcgataaagaggaagttaaattgtttttgtttgttgatgatataattgtttattttgaaaattttgaggatttttttagaaagattttaaaattgataaaagaatttagtaaagtttttggatataaaattaatgtatataaattagtagtttttttatttattaatagtaattaagtagagaattaaattaagaatttaatttttttgacgatagtaaaaaaataaataaaaaaataaaataaaataattttagaatatatttaaaaaagaagtcgaaagatttttaaaggaaaattataaaatattgttaaaagaaattatagatgatataaataaatggaaatatattttatgtttatggatgggtagaattagtattgtgaagatggttatattgttaaaagtaatttataaatttaatataatttttattaaaatattattatttttttttatagagttagaaaaaataattttaaattttatatggaattaaaaaagagttcgtatagtaaaagtaagattaagttaaaagaataaatttggaggtattatattatttatttgattttaaattatattttaaggttatagttattaaaatagtgatatatcggtgtaaaattaggtatatagattaatggaatagaatagagaatttagaaataaatttaaatatttataggtagttgatttttaataaataaataaaaatataaagtggggaaaggatattttttttaataaatggttttgggataatcggttagttatatgtaggagaatgtaattggatttttattttttattttatataaaaattaatttaggatggattaaggatttaaatttaagagttgaaattatataaattttaggagatgatattggaaaagtttttttagatattggtttaggtaaggattttatgattaaagaaattatgatatatatatatatatatatagtattgtgtatatatatattatggtatatatatatatatatatattatgatatatatatatatatatattatggtgtatatatatatattatggtgtttatatatatatatatatacgttatggtatatatatatatattatgatatatatatacgttatggtatatatatatatattatggtatatatatatattaatggtatatatatatgtttgaatattatttagttataaaaagaaatgaattaatagtatttgtaatgatttggatgagattggagattattattttaagtgaagtaatttaggaatggaaagttaaatatcgtatgtttttattgatatgtgggagttaagttatgaggacgtaaagtataagaatgatataatggattttggggatttggagggaagagtgggaagggggtgagggataaaagataataagtatggtgtagtgtatattgtttaggattacgtttggttaagttntgtatttntagtagagatgggttttattatgttggttaggttggttttaaatttttgattttaggtgatttacgtgatttagttttttaatgtgtagggattataggtataagttattgtgtttggtttgaaattttttaagatttgttttggtgtatggtatgtgattaattttatgattgttttatgtgtgtttaaaagtatatgtttttttttgttatatatatatatatatgtatgtatttttattagtttaattttgttaattttgttgtttaaattttttattatattattattttgttagtttgatttatttgtttttgaaggaagcgtggattgggtaaattttttttttaattttgtttatgttttatttttatattttgaggatatg

SEQ ID NO: 13 - DNA, 6216 bp, Artificial Sequence
  chemically treated genomic DNA (Homo sapiens)
ttttatttatttagttattttttataatatatgatttatagatattttatttttttgattgttttgtttgaatatgttttagtttgttaatgtttttttaaatgtagtatttagaattaaatgtaaaattttatgggttggttaatagaaatttaagtggaattgaaagtttttttgatttggttattattatttttttagtgtaatttaagattcgttagtattttttggtattgttaatttatagtgaattaggatttagtttttttttttatatatgttattattaagttttatttttttatttttaaatgttttgtattaaatagggtattaaaattttttattgtaatgttttttattttataagtttgggtttattttggattttagtttttatgatttaatttttagaggtttgtgatattttttgggttttgtttttggaagtatagttttttttttgttatttatatatgtatttttaagatttgagtttattagagaataatttataaggatattgtagtttattagaaatttttttttttttaatttattattggaatttttttaaattttatagttttgaatttttaattggattttttttttttttaagttattttttttttttggtgttaggttagattatatttattttttttttgatttttttgaagtttattttatatatatatatatatatattatatatatatatatatatatatatatatatatatatatatatatatacgttaattaatttatgtgattatgtttagtaatttttttttttttttttttagtttttttgtttaatagatatttagatgataggattattttttttaagatttttgttatttttattttgttaattaaattttttttatttattattaggattaagtttagtttagtaatttattttattgtttttttatttttttgagaattgtaattatattgtattagtaagagagttaagaatttattagatgtttttttaaatttaagatggttttaaaaataagaaaaaagaatgtattagatatgttgttattagaataatttttagtagatatttagatgttttatgtttttgattatttttttttgttcgtttatgtgatagttttatgaaatgttatttatatttttatttattttatttattttttatttttatttttattttgagatggagtttcgttttgttatttaggttggagtgtagcggtacgatgtgggtttattgtaatttttgtttttcgggtttaagcgatttttttgttttagttttttgagtagttaggattataggtttgagttatcgtatttggttgatttttgtatttttagtagagacggggttttattatgttggttaggttgattttaaatttttgatcgtaggtgatttatttgtttcggttttttaaagtgttgggattataggcgtgagttatcgcgttcggttttatttatatttttaatttgagaagttttttgtatatttttataattataattatttttattttttcgttttatttttattgaatgttttttattttttagttaatgaattattagttatatttttttgatatattattgttttttttttttgtatggtatttttgaattaagttttttagatgttagttagaagttttatttttttaagtttaaataatatttataaaattgtatttttttgagtgtattaaaattttatattttcggttagtcgttgcggtttatgtttgtaattttagtattttgggaggttaaagtaggtagattatttgaggttaggagtttgagagtagtttggttaatatggtaataatttgtttttattaaaaatataaaaattagttaggcgtggtggtggcgtgtttgtaattttagttatttaggaggttgaggttgaagaatcgtttgaatttaggaggtggaggttgtagtgagcggagatcgcgttattgtattttagtttgggcgataagagtaaaattttgttttaaaaaaaaaaaaaattatattttttttattatttatattttgggtgttggtatatagatatttgaggttttaaaagtgttatttttgatttttttttttgtttttttttgagaattattaggtattgttttagttttagttttttttaattagatttatattttatatagtttttagaaatataataattattaatatagtattatgttttaatggaggaattagttttgattaattgattagttatatattattattaatattattattattattattattattattattaatatttttttcggttgggtgtagtggtttatatttgtaattttagtaatttggaaggttaaggtgggaggattatttgagtttaggagtttgaggttgtagtgagttatgatcgtgtcgttgtattttagtttgggtgatagaatgagattttattttttatttttttggatgtttgttttttgttttttttttttttttttttaaaaagtttttaaatttttagatttttttaaatgttgtaaaaatagtataaaaatgtttttatattttttatttaatttttttaaattttatataattattataattaagaatagtattggtaatttatagatatttaaattttattaatataattaatgttttttttttggtataggagtcggttgagtgttatatattatatttagttgttaagtatttttagttttttttaatttgtgatagttttttagtttttttgttttttatgattttaatagtttcgagaatatttgattttttaaaatatacgcggtgataggtgattacgggagttttagtttatcgtggatttagtaaaatattaagtgatgataagaagttgtttttaaatgatttattttgtattttatcgttaataaaattatatttagttatttaaagattgagaagggaaaaattttatgtaattatttgattatttttttttgtggagagaaaaaaaattgataaaataatgagttttggaatagaatatagtagaggtattatgtttaaagagagtagtagatgtggttagggaaaggttatatgtagaaaagggatatataagtgatggcgaggtgtatcgaggaataattaatagttgaataaaaatgtattaattagaatgttaagagtttaaattagaaagattttgaattttaaatgtattataaataaaatttatttttttttaaataaagttttttgtagaattttgttttagtttttgttttttttattagaatagagaagcgagtattatttttggaggatatattttattattttttgaaattgtttttttgtatttagttatttcgttattataattagttgagaaatattatagttttttattaatataggttaaagattttttttaggattaataaagttagatttaaaattgtttttttgaatatatgtaatttgtgtgtattagtttcgatcgttggggtttttgaggagattaataaattgtaaagtgtatttttagaggaagggtttaattattttggggggttttagaattgggtttttttataggtagatttggagaagataggagagggtaggaaaggaaagtgaaggatatgaatattatgtgtttagtgtgtaaaggtttgttggtattttgtttatgggaattttgaagtttgggtatataaggtttagttgtagttgtagtttttaatagtcgtttttatttttataaatattgttatgattatttagatacggaatttgtgattatattatttgtttttgttttgaatttgagggagtttatttaagttaataagtaggtttttgaggatatgtgtggtaaatgtttatttagtgaagggattaaggggtttagtaagtatttgtttattggtataatggttgttaatttaattttattgatttttttaaatgtttttggagtttagaaatttatttaatttaagggtattttatttggggttttgggagttaaatgttaacgtagtttttaatttttttaagttttttaattttttgggtataatttttatatttgttttttggttaaaattatttttttatttttagtttagttttttggatttttttaggttaatttttggtaagatttttgtcgaattgtatttgtaaattagggtttggggtacggtggtagttttttcgtttgttgtttttttaatttcgtttggttttattggttttaggatagtatacggtttagagtgggaagagtgaggtatttattttggtgaaaaataatttagtaattaagataaatgattttttatgtattattttaaaaaaattagaagtaatgtaaaaatttatgatgaataaatgattaatatttgaaatatagataggattttaatttgtatttgtatgattttgtttcgtttgttttattttaaatttagttttgatattttaattaaattttatttataaaataagggggtcggttagtaggatgtagtttgtttatacgatttttttaaagtatcgtattgattattgtttatttcgatgattgaagggtttttttggtatttttgtagtaaatgcgttttattttagttttggttttgttttaagggtttttgtttaggtatatcgtgattttattttttttttttttttcgaggttttttttagagtttagcgtttaagtttcgggtgttttttggattcgtttttttttttcgtcgggttaggtgtcgagggcgagtacgggcggcgcggagagtagtttcggttcgttttttacgatttttttttttgcgagttgggttatttagcggttttgtcgtttagcgcgtcggggtttagatttcgtttcggtttcgttttcgacgtttgtcgttttagtttcggttttttttatataaatcggttatttgtttcgtttcgtttcgtagcgtcggagttaaagtcggttttcggtttagtttcgttttgtagtagtttgtttttttttttaatatgatagatgtcgttgtgtttttcgttaaggattttttggtaggtggagtggtcgtagttatttttaagacggcggtagcgtttatcgagcgggttaagttgttgttgtaggtacgttttgggatttaggagtttaattaggaagtggggggaagggtcgtatagaaggcgggcgttcgaggggtggcggggagcgaattttaaagatatggttagggaagcggtttaggagaggttagagcggggcgtagaggtagaatagaagttaaattggtgggaggcgtttttagtgatttgaagtagtgagtttaggaaggggtcgggggtagagggtaggattaggttttcggtattttcgaggcggcggattcggatggagtagtttttgagtgacggttttttcgggtttgggcgttaagggcgaaggtcgaaagtcggcgttagaaagaggaacgttagtttttatcgaagattttaaggtcgcggtaaggagataattgttcgggggaggttatgcgttcgggtttagcggttttttagttcgcggacgcgtttaaatttcgtcgggtcggaagtcggcgtcgggaagcgcgtgtgttttttacgttcgttttcgcgtagtcgcggtcgttgtcgtcgcgttttcgtttgtttttttgcgtcgcgcgttttttagtgtcggttttagagggcgtttttgggttagcgtgtagggttggcggcggcggcgttcgggttatttttgggagcggagtgggggcggagcgagacggaagtagtttaggagatttgaggcgtaggttgcggtttttaaggtgatcgcgttttatgtgggattcgttttaatgtttttgaatttgggtttgaggtaatgattttttttttaggtttgaaggttacgggttcgttggaggatgttttttttttatttagaggggtggaggtttaatgttattggtgtagattatttttttttttgtgatagttttagagggttgggagggtttagttagtatgatatacgaagattagatttgagagaggggagtttattttaaagggtattgatcgagatggtataagttttttttttttttttttttatggttataattgtttttgttggttttttttttgtttgttagg

SEQ ID NO: 14 - DNA, 6216 bp, Artificial Sequence
  chemically treated genomic DNA (Homo sapiens)
tttaatagataggaaggaagttaatagggatagttataattatggggaagggaaagagaagagtttatgttatttcgattaatgttttttaaggtaggttttttttttttaaatttagttttcgtatattatattggttggatttttttaattttttgaggttgttataggggaagaggtgatttgtattagtagtattaagtttttatttttttgagtggagagggggtattttttagcggattcgtgatttttagatttaggagaaaggttattattttaaatttaggtttagaggtattagggcgagttttatatagggcgcggttattttggggatcgtagtttacgttttaagttttttgagttgttttcgtttcgtttcgtttttatttcgtttttagaggtgattcgagcgtcgtcgtcgttagttttatacgttagtttaggagcgttttttagagtcggtattggagagcgcgcggcgtagggaggtaggcggagacgcggcggtagcggtcgcggttgcgcgggggcggacgtaaaaggtatacgcgtttttcggcgtcggttttcggttcggcgaggtttgagcgcgttcgcgggttgggaggtcgttggattcgggcgtatggtttttttcgggtagttatttttttgtcgcgattttgaggttttcggtaagaattggcgtttttttttttaacgtcggttttcggttttcgtttttgacgtttaggttcggggaggtcgttatttagaaattgttttattcgagttcgtcgtttcggagatgtcgagagtttggttttgttttttgttttcggtttttttttagatttattattttaggttattaaaggcgttttttattagtttgatttttgttttgtttttgcgtttcgttttggttttttttaagtcgtttttttggttatgtttttagagttcgtttttcgttatttttcgggcgttcgttttttgtgcgatttttttttttattttttggttgggtttttggattttaggacgtatttgtagtagtagtttgattcgttcgatgggcgttatcgtcgttttggagatggttgcggttattttatttgttaggaagtttttggcgaaggatatagcggtatttgttatgttgaaagaggaggtagattgttgtaggacgggattgggtcgggaatcggttttgatttcggcgttgcggggcggagcgaagtaaatggtcgatttatatagggggagtcggagttggagcggtaggcgtcggaggcggggtcggggcggggtttgggtttcggcgcgttgggcggtagagtcgttgagtggtttagttcgtaggaggaggagtcgtggagggcgggtcgggattgtttttcgcgtcgttcgtgttcgttttcggtatttgattcggcgagaggaaggggcgggtttagagaatattcgggatttgaacgttggattttgagagaggtttcggagaggggaggaagggtgaggttacgatgtgtttggataaaaatttttggagtaggattaggattagggtgagacgtatttgttatagggatgttaaaagaattttttagttatcgagataaatagtagttaatgcgatattttaaaaaagtcgtatgggtaaattatattttattggtcggtttttttgttttgtaaataaagtttaattggagtgttaaggttgggtttagggtgaggtaagcgagataaggttatgtaagtgtaggttgggattttgtttgtattttaaatgttgattatttgtttattatggatttttgtattgtttttgatttttttaaaatagtatatgaaaaattatttgttttaattattgagttgttttttattaaggtgaatgttttattttttttattttagatcgtgtgttgttttggagttagtgaaattagacgaaattaagggaatagtagacgaaggaattgttatcgtgttttagattttggtttgtaaatatagttcgataaagattttgttaggaattggtttgggagagtttaaaggattgggttgggggtggggaaatgattttagttagaagataaatatagaggttgtatttagaaggttaagaggtttaggaaggttaagaattacgttgatatttggtttttaggattttaggtaaagtgtttttggattgaatagatttttgaattttagaaatatttagaggaattaatagaattagattggtagttattgtgttaatggataagtgtttattgagttttttaatttttttattgggtaagtatttgttatatatgtttttaaaaatttatttgttagtttaagtggatttttttaagtttagaataggagtaaatagtgtaattataagtttcgtgtttgaataattataataatgtttataaaaataaggacgattgttgaaaattgtaattgtagttgaattttatgtgtttagattttagaatttttataggtaaaatgttagtaggtttttgtatattgaatatatagtgtttatattttttattttttttttttgtttttttttattttttttagatttgtttgtgaaaggatttaattttaggattttttaggatggttaggttttttttttgaaagtatattttgtaatttgttagtttttttaagaattttagcgatcgaaattgatgtatataaattgtatgtgtttaaaggagtaattttgaatttagttttgttgattttgggagaaatttttgatttgtgttagtgaaaggttatggtgttttttagttgattataatagcgaggtagttgaatgtaaaaaaatagttttagagaatggtagagtatattttttaaaggtgatattcgtttttttattttggtgagagaaataagagttaaagtaaaattttatagagggttttatttggagagaggtggattttatttataatgtatttaaaatttaaaatttttttagtttgaatttttgatattttgattaatgtatttttatttaattgttaattatttttcgatatatttcgttattatttgtgtattttttttttatatgtgatttttttttggttatatttgttattttttttgagtatgatgtttttattgtattttattttagagtttattgttttgttagttttttttttttttataaaaaaagatgattaaataattatatagaatttttttttttttagtttttgggtaattaagtgtggttttattgacgatgaaatataagatgggttatttaaaagtaattttttgttattatttggtattttgttaaatttacggtgagttggagttttcgtagttatttattatcgcgtgtattttaaggagttagatattttcgaaattgttaagattatgaaagataaagagattaaggaattgttatagattaaaggagattaaagatatttgataattgaatgtaatatatgatatttaatcggtttttgtattagaaaaaggatattggttatattggtgaggtttgaatatttgtagattattaatattatttttggttatggtggttatgtaagatttagagaagttgaataaaggatataaggatatttttgtattatttttgtaatatttaaaaaagtttgaaagtttaaaaattttttaaaaaagaaggaaaaagaaataaggagtaagtatttaggaaaatagaaaatagagttttattttgttatttaggttggagtgtagcggtacgattatagtttattgtagttttaaatttttaggtttaagtgatttttttattttagttttttaaattgttgggattataggtatgagttattgtatttagtcgagaagaatattaatgatgatgatgatgatgatgatgatgatgttgataatgatatatggttggttagttaattaaaattaatttttttattgagatatagtgttgtgttagtaattattgtgtttttggaagttatgtaaaatataagtttaattaagaggaattaaagttaaggtaatgtttagtaatttttaaggaaaaataaggaagagagttagaaatgatatttttaaggttttagatatttatgtattaatatttagaatatgggtaataaagggaatgtaattttttttttttttgagatagagttttgtttttgtcgtttaggttggagtgtaatggcgcgattttcgtttattgtaatttttattttttaggtttaagcggttttttagttttagttttttgagtagttgggattataggtacgttattattacgtttggttaatttttgtatttttagtagagataggttattattatgttggttaggttgtttttaaatttttgattttaggtgatttgtttgttttggttttttaaagtgttgggattataggtatgagtcgtagcgattggtcgggaatgtaaaattttaatatatttaggaaaatgtaattttataggtattgtttagatttgggagggtggaatttttggttggtatttggaaaatttgatttagagatattatatagaagaagagagtagtaatatgttaagaaggtataattagtaatttattggttggagggtgaaaagtatttagtgagaatgaaacggagaaatgaaagtgattatagttgtagaagtatataagagattttttagattaaaagtatgaatggggtcgggcgcggtggtttacgtttataattttagtattttgggaggtcgaggtaggtggattatttgcggttaggagtttgagattagtttggttaatatggtaaaatttcgtttttattaaaaatataaaaattagttaggtgcggtgatttaggtttgtaattttagttatttaggaggttgaggtaggagaatcgtttgaattcgggaggtagaggttgtagtgaatttatatcgtgtcgttgtattttagtttgggtgatagagcgagattttattttaaaataaaaataaaaataaaaaataaataaaataaataaaagtatgaatggtattttataaaattgttatatagacgaataggaaagggtgattagagatatagaatatttgaatatttgttggaagttattttgatagtaatatatttgatatattttttttttttatttttaagattattttaaatttaagaaaatatttgatagatttttggtttttttgttgatatagtgtaattatagtttttaaaagaataaagaagtaatgaggtaaattgttaagttgggtttaattttgataataaataaggaagatttggttagtaaagtgaaagtgataagaattttggggaaagtgattttgttatttggatatttgttaagtaaaaaaattaaaaaaaaaaaaaaaaaaattgttgggtatggttatataggttaattaacgtgtgtgtgtgtgtgtgtgtgtgtgtgtgtgtgtgtgtgtgtgtgtgtggtgtatgtatgtgtatgtgtaaggtagattttaaaaggattagagaaaagataagtatgatttggtttaatattaaaagagaaagatagtttaaaagggagagggatttagttgaaaatttagaattgtagaatttggaaaagttttaatgataaattaaaaagggagagatttttaataaattatagtgtttttatagattattttttgatgagtttagattttaaaagtgtatgtatagatgatagaaggaggattatgtttttaaggataaagtttaaagaatattataaatttttaggaattgagttataagggttaaagtttagaataaatttaggtttataaaatgggaagtattgtaataaagggttttaatgttttatttagtgtaagatatttaaggatgaggagatagagtttaatggtagtatgtgtgaaaaagagaattaggttttagtttattgtgggttgataatgttaaaaaatattaacgagttttgagttgtattaagagaatggtagtgattagattagagggatttttagttttatttgggtttttgttggttagtttatagagttttatatttaattttggatgttatatttaagaggatattaataaattggaatatatttaaataaggtaattaggaaagtgaagtgtttataaattatgtattatgagaaatggttgaatgaatgaga

SEQ ID NO: 15 - DNA, 5321 bp, Artificial Sequence
  chemically treated genomic DNA (Homo sapiens)
ttttttattgatatatattttgtagatttataatatcgagggttttttacgaattttaagaagtttttttttttttttagtgttgttagggattttttttttttttgatatagattttaatttgttgttaaaaagatagtaataaaggcgaaggaaaaattttgtttttttgtttttgttatttatttttttttatttaattattttttttgttttttatatttaagtaaatattaaaagagaagaggaagataaaatcgttattgttttttttattaatttttgtagtttttattatattttttataatttaagtttttgattttgtatgttattttttaggttttaattaattatttgttttttatttgttgaagtttttgtattatttttatgggaaatatgtgttttattttttcgatataatttttttatgagttggggataatgttgaattatttttaatgataattaagtgttttgttggaaaagaatttaattttaattttaaaaaggttatataaggtaatttaaataattttagttttatttataaatttaaaatattttttggtcgggtatggtggtttacgtttgtaattttagtatttagggaggtcgaggtaggtggattatttgaggttaggagtttaagattagtttgattaatagggtgaaatttcgtttttattaaaaatataaaaaagttagttaggtatggtggcgggtgtttgtaattttagttattcgggagtagagaagaatagtttggattcgggaggtagaggttgtaatgagttaaggttgtattattgtattttaatttggataataagagcgaaattttattttaaataaataaataaataaataagataaaataaaatattttttataatttataaagtattttttaaagttatttatatttttaaatttttagaataataaagtttatataattatttttagtaatataaaaataaaatatgtatttgttttaaaataataaattaggtagtgttttttagttgtttttttttgttttttgtttgtttgtttgtttgagacggagttttgtttttgttgtttaggttggaatgtaatggtgcgatttcggtttatcgtaattttcgttttttgggtttaagtgatttttttgtttagttttcggagttgttaggattataggtatttgttattatattaaattaatttttgttatttttagtatagatggggttttgttacgttggttaggttgggtttaaatttttgattttagatgatttattcgtttcgattttttaaagtgttggaattataggtatgagttgttatatttagtaattgttagttttaattgttaagatttatagaaaaaataagttttaaaataatgtaagagtttttagatatttattattttgaagattttaattttttttaattttatttattttttttttgaagtagaaatttttaatttttataattagatataaagtttgataatgataagttatttaatgttttgattatgttgttaaaatttgtaatgttataaattttgttgggggttttttggtttatagtattttaggtttagataagtttatttttgtttttgatatttttatgatttagatagaataaagaaaatattggtttagtgttttagaaattgagatggagtgggtagagttttttaaatatttgcgtattttttttatttatatataatacggttgggttggtggttttagtgatgaggcggtttattttaatgtggtttatatagtggtttatatttattaatggtttattttatagttgggttatagtacgggttataatagttatagaaattagtggggtatttatgttagggtttagggagatagaaatggaagttataattttagagattggaaaaaaataatagtgggggatataagggatgtgaggtggggtaggggtagtgatggtggtagaggtaaggtgttggttattttgatttagttaggttgtaggtatatttttttatcgttgattatttttttagttatatttttggtgtatgtaatgtagtcgatattttgggaggttaatttagattttgttagtgttttttgtagtaggtttaggataatagttcggtgatgtttggttgtattatttggaaggaattttagaaaatgaatataggttagagattatagggattttttgtagtaaaggtaggtaggaagttaaagaaagtaataggagttttagtgatgtagtaagagtttttttattttttttaagtattttattttttatatttttatatttatttttttcggtttttatataggttatttaatttttagaaatgtttttttttttattttatttagtttttaggttttaatgtaagtagtatttattttatattttttcgtgatttttttttttttttttttttttgagatagttttagttttgttatttaggttggagtgtagtggtacgatttcggtttattgtaatttttattttttgagtttaagagatttttttgttttagttttttgagtagttgggattataggcgatattattacgtttagttaatttttgtatttttagtagagacggggttttattatattggttaggttggtttcgaatttttgatttcgtgattcgtttgtttcggttttttaaagtgttgggattataggtttgagttatcgtgtttggtttttggtgattttttttttttgtgattttatagaattttatgtatgatgatgttatttatttaatataataattatagtattataattttttgtggtttgtttagtttaattatgaatattttaaagtattgagtattttatttatttttgtatttttagtgtttaagtgtttagaggagtgaatgttaaatatatatatatatttttagtgagtatttgttataatattatttgtttagggaggttttttagatatatgtaagttagttgtttttttttatgtatgtaagtgtttgaggggagagtagtaagatataatagtttatttaaaatattaattaaaagttgtaatgtgttttgtattttttttttttttgagatagagttttatttttgatgtttaggttggagtgtaatggtattatttcggtttattgtaatttttgtttttcgggtttacgtaatttttttgttttagttttttaagtagttgggtttataggtatgcgttattacgtttagttaattttttgtattttttagtggaaatatggtttttttatgttggttaggttggtttcgaatttcgattttaggtgatttgtttgttttggttttttaaagtgttgggattataggcgtgagttattacgtttagtcgtgtttggtatttttatttaatttttaagatttaatgatataggtattatttttattttaaaaataaagattaggttcgagcggtggtttatgtttgtaatttttatattttgggaggttggggtgggcggattatttgaggttaggagttcgagattagtttggtttggtggaaatttcgattttattaaaaatataaaatttagttggatgtggtggcgtatatttatagttttagttatttgggaggttggggtagaagaatcgtttgaatttggaaggtagagattgtagtgagtcgagatcgtgttattgtattttagtttgggcgatagagtaagattttgttttaaaaaaataaaataaaataaaaaataaagattaaatgtttaaaataaaaatatttaatatgaatatagtaaagttagttagttttgtttgatatgtaagtcgggagtttttttatttttatttttttatttattttagaatattttaaaaaataatttttttttaaaaagggagtgtatatttagggtaattggaatttatatttttgttaagcgttttttaaatagaatatttcgagtttatttttattatattgtttattatgttgtagtataaatatttatttatatgtttgattttatagtagtataatatttatttttgaatatttagtatataaaatgcgtttagtaaaaggtaaatgaatttattagatttacgtttaagtgtttgtaatttttttagttattagttttgtgacgttaataatgttatataattttaatgagattcggatcgaaagttgtattttattagtatttaggaagatggaaggttgattttgtgcggggaagtgcgcggaaaatttttaagttttttatttattaatttgtgttaggaggcgtgacgtaagttcgtcgcgggttcgttagtattttgttatttcgtattacgtttacgttaattttattggcgttgtttttaaaatttagtatcgtcggtatggcggaggttgggagaaaacgtcgataggatttttggtaatgttaggagttgtggaggtttttattagttcgcgttgggtcgtagtttttcggagcgtagaggaagttggttagtttgtagatagtattgggaaagatatcgcggaattttcgcgagcggagattcgttaaggtttttttagggatttgtttttttaattgttagggacgtcgagttaattttgtgttttatattcgtattcgtttttttatttttttttcgtggtttagtttagttttttttattgttttttttttttttgtatatagttagaattttaagttagtgttatataatgtgttgtgtatttggtataacgataaatagttcgagggagggttggggatttaagtgttttagagaattagaggagggaggcgaggttaagcgttttcgttacgtggtgttagatagattaattacgcgtatttttcggttacgataagcgcgtttttgattacgtgattaggttcgttatttacgtgggggtttagcgtgtatttttttttgtgttcgggttaggaggagttaggttgttatcgggtcggtgtagatacggggttgtttttttgtttataagaggggtttcgttggtagtttgaacggtaagtttgagttaggatttttaattaagatttttaattggttggagggtagatttcgcgagtagggtataaggtattatgaaatgatttagtttcgtgggtgaggggttgaagggtttatgatgtacggaggcggggaaaggatttagagataacgtggtttgaaaggcgggatttggtgcggggacgtttttgggaggagttttttttttagttttagttggttttatgatttttttgcgtttgtagg

SEQ ID NO: 16 - DNA, 5321 bp, Artificial Sequence
  chemically treated genomic DNA (Homo sapiens)
tttatagacgtaaagaaattatgaaattagttaaggttggggagaagattttttttaagagcgttttcgtattaggtttcgttttttaaattacgttatttttaaatttttttttcgttttcgtgtattataggttttttagttttttatttacgaaattagattattttatagtgttttgtattttattcgcgagatttgttttttagttaattgaggattttaattaagggttttgatttaagtttgtcgtttagattgttagcgaagttttttttatgagtaaaagagtaatttcgtatttgtatcggttcgatggtagtttagttttttttaattcgagtataaagaagggtgtacgttgagtttttacgtgggtagcggatttggttacgtgattagaggcgcgtttgtcgtggtcgaagaatgcgcgtgattggtttgtttgatattacgtgacggagacgtttagtttcgttttttttttttaattttttaggatatttaggtttttaattttttttcgggttgtttatcgttgtgttagatgtatagtatattgtgtgatattgatttaagattttaattatgtgtaagagggaaaaaaatagtggagaaggttgggttggattacgggaaagagataggaaaacggatacgaatgtaaggtatagagttggttcggcgtttttggtagttaggaagataggtttttggaggggttttggcgggttttcgttcgcgggagtttcgcggtgttttttttagtgttatttgtaggttggttagttttttttgcgtttcggaaagttgcggtttagcgcggattagtgaggatttttatagtttttgatattgttaggagttttgtcggcgtttttttttagttttcgttatgtcggcggtgttgggttttgaaggtagcgttaataagattggcgtgggcgtggtgcgggatggtaaggtgttggcgaattcgcggcggatttacgttacgttttttggtataggttggtgagtaggggatttaagagtttttcgcgtattttttcgtatagaattagttttttatttttttaaatattagtgaggtgtagttttcgattcgagttttattgaaattatgtgatattattaacgttataaggttgatgattagaagagttataggtatttggacgtggatttgatgagtttatttattttttattgagcgtattttatgtgttaagtatttagaaatagatgttatattgttgtggagttagatatataaatagatgtttatattatagtatgataaatagtataatagagatggattcgaaatattttgtttaaaaaacgtttagtaggagtatagattttagttgttttgaatatatattttttttttaaaaaaaaattattttttgaaatattttaggatgagtagagagatgagagtggaaagattttcggtttatatgttagatagaattggttggttttgttatatttatattaaatatttttgttttggatatttggtttttattttttattttattttatttttttgagatagagttttgttttgtcgtttaggttggaatgtagtggtacgatttcggtttattgtaatttttgttttttaggtttaagcgatttttttattttagttttttaagtagttaggattataggtgtgcgttattatatttagttaaattttgtatttttagtagagtcggggtttttattaggttaagttggtttcgaatttttgattttagatgattcgtttattttagttttttaaagtgtggaaattataggtatgagttatcgttcgggtttggtttttgtttttaaaatgggaataatatttgtattattaggttttgaagattagatgaaagtattaaatacggttgggcgtggtggtttacgtttgtaattttagtattttgggaggttaaggtaggtagattatttgaggtcggggttcgagattagtttgattaatatggagaaattatgtttttattaaaaaatataaaaaattaattgggcgtggtggcgtatgtttgtaaatttagttatttgggaggttgaggtaggagaattgcgtgaattcgggagatagaggttgtagtgagtcgagatggtgttattgtattttagtttgggtattaagagtgaaattttgttttaaaaaaaaaaaaagtataaaatatattataatttttaattgatattttaaataagttattatattttgttattttttttttaaatatttgtatatataggagagggtagttgatttgtatgtatttgaaaagtttttttgaataggtgatgttgtgatagatatttattagaaatatatatgtatgtttagtatttatttttttgggtatttgggtattgggaatataaagataaataaaatatttaatgttttgagatatttatgattaagttgagtaaattatagaaaattataatgttgtaattgttatgttaaataaatgatattattatgtatagagttttgtagggttatagagaaagaagattattaaaggttaggtacggtggtttaggtttgtaattttagtattttgggaggtcgaggtagacggattacgaggttaggagttcgagattagtttggttaatatggtgaaatttcgtttttattaaaaatataaaagttagttgagcgtggtggtgtcgtttgtagttttagttatttaggaggttgaggtagaagaattttttgaatttaggaggtggaggttgtagtgagtcgagatcgtgttattgtattttagtttgggtgatagagttgagattgttttaaaagaaaaaaaaaaaaaaaagattacgaaagggtatgaggtagatattatttgtattgagatttgaaggttgagtagggtaagaagaagagtatttttgaaagttgaatagtttatatagaagtcggaaagagtagatgtgaaaatgtggaagataggatgtttggggaaagtgaaaggatttttattatattattaaaatttttgttgttttttttaattttttatttatttttgttatagaaaatttttgtgatttttgatttatgtttattttttaggattttttttaggtgatatagttaggtattatcgagttgttattttagatttgttgtaggaggtattaatagagtttggattaattttttaggatatcgattgtattgtatatattaagggtatggttgggagagtggttaacgatggaggaatatatttgtaatttggttaggttaaaatagttaatattttatttttgttattattattatttttattttattttatattttttatgttttttattattgtttttttttaatttttaggattataatttttatttttatttttttaggttttggtatgggtgttttattggtttttgtggttgttgtggttcgtattgtggtttaattgtggaataagttattggtgggtgtgaattattgtataggttatattgagatgggtcgttttattattggagttattagtttaatcgtgttgtatgtgagtggaggaaatacgtaggtatttagagggttttatttattttattttaatttttgaggtattgaattagtattttttttgttttatttgagttatgggaatgttaggaataaagatggatttatttgaatttaaaatattgtagattagaaaatttttaatagagtttgtaatattgtaaattttggtagtatgattagaatattagatggtttattattattagattttatatttgattataaagattaggaatttttattttaggaaaggaatgaatgggattgaaaaggattgaaatttttaaaataatgaatatttgaaagtttttgtattattttgaagtttattttttttataaattttagtaattgaaattaatagttgttgggtatggtaatttatgtttgtaattttagtattttgggaggtcgaggcgggtggattatttgaggttaggagtttgagtttagtttggttaacgtggtaaaattttatttgtattaaaaataataaaaattaatttgatgtggtggtaggtgtttgtaattttagtaatttcggaggttgggtaggagaattatttgaatttaggaggcggaagttgcggtgaatcgagatcgtattattgtattttagtttgggtaataagagtaaaatttcgttttaaataaataaataaataaaaaataaaaaaaaataattaaaggatattatttgatttattattttggggtaagtatatgttttgtttttatattattgggaatgattatgtagattttgttattttaagagtttagaaatataaataattttaaaaaatattttgtaaattatagaaggtattttattttattttatttatttatttatttatttgagatggagtttcgtttttattgtttaggttggagtgtaatgatgtaattttggtttattgtaatttttgtttttcgggtttaaattatttttttttattttcgagtagttgggattataggtattcgttattatatttggttaatttttttgtgtttttagtagagacgggattttattttgttggttaggttggttttgaatttttgattttaggtgatttatttgtttcggtttttttaagtgttgggattataggcgtgagttattatgttcggttagaaggtattttaaatttataggtgaagttaaagttgtttgggttattttatatgatttttttaaggttgggattggatttttttttaatagaatatttgattattattagaaatagtttagtattgtttttagtttatgaaagggttgtgtcgagaagatgaggtatatgttttttatgaaaatgatgtagaaattttagtaggtagagggtaagtagttggttgaggtttgaaggatgatatataaggttagagatttgggttgtggaaagtataatggaggttataagagttgatgaaaggagtagtgacggttttgtttttttttttttttttaatgtttgtttaggtgtaagaaatagggagggtgattaggtggagaggagtggatagtagaagtagaaaggtaggatttttttttcgtttttgttattgtttttttgatagtagattaagatttgtattagaaagggaagaaatttttaatagtattgggaagggaaagggattttttaaggttcgtaggaagttttcggtgttataagtttgtagaatatgtgttagtaaggga

SEQ ID NO: 17 - DNA, 11422 bp, Artificial Sequence
  chemically treated genomic DNA (Homo sapiens)
atttttatgttattatttttaggaaaaatttaaaatagtttttatatataataaaagtaagttagataaattatattgtatttatataaataattaatatataggtatataaatgaagttaaaaaaatattcgatagtattattttggaaaaatttaagataggttatatgaaagtaggttattaaagattatgtatgatgtatttttaaattagtttgaagtaaaaggtatagttgtgtatgagaataagtaattaaaaaaaagaaaaagtatatatatatatatggtagtataaaaatgtttttagtatttaagttttaggattttgttttttagtgtgtagtttgtgaattttttttattagttttatagaggatagtagtataacgttgtttttaagtttattgaaattaaagtttagggatgtggtttagaaatttggatgtttaaatagtattttgatgaatttgataatgtgttattttgtaatttttttgagagtgagattttaaagatagttaagggtttgggaagagtaaatttaagttaatttagtaaattaggtgataaataaagaagtttgttgtttttttttttttttttatgttttaaaataatgagtttttttttttttgtttaagttttgaataatttagtttagaatttgtttttttattttgattttgttggttttgttaattttatgaaaatttatttggtattatatttttttagaagtttttgtttttttttgattttttttttgtttttagagtttaatattttagtgttttattaaattgttgttgtttttttttaaaatttttttaattaaattatttgtatttttatgtaaaaggtattatagattttttattatttatttttttttaattttaaaatatttatgtgttattttttatagatgttattttttgtaaggttttttatattagttgttataatattattaaagaattttattatttgtggttttggatttatttttaatatttttggagatatttatttttaaatatttgttatatttagttatgagggtttagtatttgggttttagagatatgtttaggttagttttgattataagaatattttttttttttgttagaattgttggaaagttatttttatttaatagtttgtgtaggattttagaagattgaatatatatataaatatatatatatatatatatgtatatatatatatatatatatatgtatatgtattttgtttatgtcgtatttggttattttaattttgggaaaataaattaagaaaataattaaaagatgtatttaaatatcgatatataaaatgtttattgtaataatatataaaaaaagttagaagttaatttcggtatttgtatgatttggagtaagttatttaaattttttgtggttatatttttttaaatgtaaaataaggttaataatagtgtttattttaaaggtagttatgagttttaaatgaatttatgtatttaaagtggatagaatagtgtttttaaataatatttattatttaaaattattattattattatataagtaataagagatataatgaattataatatgtttatatgataatatattatatagtaattaaaatattttaataggaaattaatattataagataaaaagtaagaagaatgatgataagttatttgattattattatatttatttatgtaattataattatatatatatattttaaaaaattgattggaatatataaaatggtttttttattttttgtgatatgtaaaatgtagaaatatatttttttgggttggatgtagtagtttatatttataattttagtattttgggaggtcgaggttggtggagtatttgaggttaggaattcgagattagtttggttaatatagtgaaattttgtgtttattaaaaatataaaaattagttagatttggtggtgggtgtttgtaattttagttatttaggaggttgaggtaggaaaattgtttgaatttaggaggtagaggttgtagtgagtcgagattttgttattgtattttagtttgggcgatagagtgagattttattttaggaaaaaaaaaaaaaaatttatttatttatttatttatttatttatttatttatttatttatttatttatatttatatatatttttttttgttatttatatttattttagagaatgtagtgttattgtaaaaaaaatgaataaaattaatataagtttagagtatttttttggtattagtatgtttaaggaaaattaatgtataatataggattaatgttttttatattattttaaattttattgaatgttgttatttagaaaatagtggtaattgagttataatgggattttaaaagtaaaaaattattgtgattggttaattgaaagtgattatagagttaaaattataatgattgttttgtttaagttttagtatatatggttgtaaaatgtgcgtagtgttaatgtcgtgttaagtgttttgtggtattttattagtgtcgtttataaggtatatttaatatttaatagtaggattattaattatttatgttgtgatgtaatggaatagtgtttttttattaattttgaaataagtttattgtgtgtgatttatattttttcgttggatgagtgtgagaaaatgatgatattatagaagtaaagtagttgttgtaagttgagttataaggaagaaatttttaagataggaagaataaatgttttagaggtgtattaaaataatgaatgaattaatgtggtatagttgtgaaattatgcgaggaaaagaattatagggatagtaatagaaggtggttttttgaagtaaagatattgagaagaagaaaaattgttaatttgtgtaattagttgatgttgttagttagttagtttaaatatgcgttaaagataaagatttgtttgaaattaattattttattgtttggttttttgtttaaagatgaaaatgaaatatgtgtatatatgtgatatattttatttagtagtgagtagatgtaggaagtatgtaaaatgttttgttgaatttattaacgttataaaatattttttaataattgtcgcgtttgataggttgattttatgttagtataggaaataatgtagtggatttgggttggagagaagaattttgatatttggatttttaaaaattatgtatattgaatttatgaatttttatgtggaatattagatttattatattttaaatagaaatgttattattataaaaattattgtaaatttgttaatatatttttatttaaaaagtttttttttgtttttattgatttattgattaatttttttttgagataggattttattttgttatttacgatgaagtgtagtggtataatcgtggtttgtagtttcgattttttaggtttaggtgatatttttattttagttattttttaagtaattgggaatgtaggtttgtattattatgtttgatttatttttttgtagaaattgagttttgttatgttgtttagatttgttttgaatttttagattgaagtaattcgtttatttaggttttttaaaatgttgggattatagttatgaattattgtgttttatttttttttttttttttttagatagattatgtattttgtattttttgtgtaattaatttgttattatataaattatattttaaatatattataaattattgtgattatgatatttattattgaattaatattgtttaagtagtaatttttatagaaaagataattttaaaagattaaaatggttatttttttggaagtagttgatataaaataatagaataatatagattaaaattttgttttttaatagttattagtggtaagaaatatagtaagtttttgatttgtagaaattttagtttttttatttgatgaggtggttaataatattaatttttatatttgttgaaataatataaaatatttaatataaattgttaattataatgattggtataaggtagaattataataaatgttaattatatttgtttgtttgaaaatttaatattttattaaaaggtaaaaaagtgtttatttgtaaatattaatatatgttttttgtttagtttatagaaagtttataagtaagagatttaaaagtgaaagttattatttatagaagattaagaatatattgtattgagaagatagggattaaggagtttattaaaggttttttaaaaaattatttttttgaatattattttaagaaagataagcgttaaagatataaatatattttttagagtatgtgtattgtaagttgataaatgtgttttttttatagagtttggtgaaggttatttattttattttttttgttttgattagaaaattgtggttttttattatgtatgattgtttgtagggttttttgaataggaaattattaatgttgaaatttgtatgatttaaataagtgttgaagtgtgggggttgaaaggagatatatattagagatatttatttagttaatagaattaagtttttgatttgtatagtttatatttagagtattgtgttttttattttttatattattattttttttaattatataattagtatagattgaagttataatggattttaataatagtattattttagaatgatgtatacgtttttaaattttaagataagtataggaaatatgtatatttttaaaaaaaggaaaatttttttaaagtttagagttaaaagaaatatgtattttttgttatattttagattattttagttaaagaattttttatgttttttttttttatttttagaagattatttgtaattgtaaagtatgaattttgtaatatttttgtaaatgaattattattgtatttatattattagtttttgaatagattttaagttgttgttgttaattttcgcgagttttgttagtaatagttgattgttatatttagtaatattgaatgttagtgtagtttaatttataggttggagtagtagttgtattttgtattttttcgaagtattatatgatttttattttttgtaaattttgttatttttgttgtagagaatcgggtaagttgttttgaatttatattttcgtgtagagatttaagttattgtaaagtttattttgtgggatgagagtgatttttttatgtgtttgttgtgtttttttggtgttttgtggggaatagttattgaagtttgtaaatgggatagaggaagtgagttagtaggtatatgtattaaatttttttattatttagggaacgtagattttgtttatttaattgttgagaaaataatgaatttatttaattttgtataaaggattatagtacgtgtggaattattgtgatatatatttttagtgagttttttaagaaaaaatattttatattggtttatttttaaatgtattgtttattgaatttttttgtaaaagtaatttttgattagtttttttttttttttttttttaaatgggataaagttagtagttaatttatttttttttgaataaaatattttttttaattaatattttgttatttaaaattttaatagtaataattggtaaatgagaggtttgtttattttatgtaaataaaaataaaatttgttttttaatttgatttatagtgatttatgagcgtgttttttttgttttttgtgtttattttttatatgtttgtttaaattgtagtaaaatattttatatttgttattattttattattatagaaatagtaagtaaatgtattttttgtttattttataattttgtaaaattattattttgataatattagttttattttaattagggaattaaatattaaggattataaaatttatgaatgattaaaagtaaattgaaatgtgattttattgtttatgatttttatttattatatatttttattttatgagtatgttttttatatttttatgaatatattttatgataataaatttaattaggagtttttgttattagtttgtgtaatgttttttttaatataaattattttatagttataataaatataatgatagtttatttatataagtagttattttgtttaaggataagcgtgagtttttaaagtgtgattttaatatttgaataaaaatttttagaattttttttggatataaaataaagtagttttttggatgttaaataaatttttaattgggttattaaagttttgttttgtttttttaattttttgttgttgttgtttgtttgtattgttttagttttttaattgtaaaaatatgtttgggatgtattttatattttatttttataaaatataagttattaatagttaaataagttatattttatttataaatttggtttttttttcgagttattttttgataagtataatatatatttatattgaatattatttttatttcgatggttttttgttagtatttgtttatttttattaaaattagacggttttagatgttaagagaattgtaattgaatagatagtaatttaagaggagatttaatttttagagaagatttaagaaatttttttaataaatgtttaaattatttatataatgaagtttgtaaatgttttttttaattgaggatagataaaatattttaagttttttatatttaatgtagtgttttttatatgtatatatgtttaaagtatagttgaagaatttttgaaagatagtgatgtagtttatttataattagatttttttaattttttattttatttagtttgtaataaaataagttttttaagtttgatataaagacgtcgttgttttaatttttttaaatatatttaagagagtttgttttagattatattaatattatttagatggttttttttttattattttaagagggtttatttttaagtagaaataaatatttatttaattgtaattttttaaaagatagggaaattatatatagggaaaatattttgaatatttgtttgaatattttttaaaaatttttggtttgttttttattttgaaaatttggttgatatttaagtattttaaaaaatagttttttatataaattattttattatatttatattttatagtataatatttagtattttttgttaaaattagttagggaatattaatagtatttttaaaattgaattaaaaatataaaaaaagatttgttattttttttatttgaaagttattgttataatagtttagtatttttaaaaattgttagtaaatttttttaattttaaataaaaatttagttttttaaaaatttaaattttttaaaaatttaattttttaaaaattagaatggtttgaattttaaataaaaatttttgtttttatttttaatattaaatattattttgataagtaaattgatttaaatttagatatatagttgtatttgtgaaaatgtgttttatttttatgataatgtttatgttattatgtttttttagaattatgtgagatagtatttaattgtattagaatttattaaaagaaaaacgattaaatttgtacgttgtgtatatgtattttaaaatttaaagtataataataataaaattaaaaaaaagaaaaacgataatgttttgttgaatattttaattattaataaaaattttgagatatagatttaatatttttattttatttttatttatttttttttcgattgtttaattatatgataaatatattaaaatttttaaagttttttaatggtaaaattatagagtagtatgttagaatagataatattagattataaaaagggtaaagtgatgtttatttaaaaaataaagtattgtaattaaatataaaaatattagtttataatatattaatagtatatgaatatttgtatatttttatattaaagtatatattaaataatatgttatatgatattttgtaataatatatatgagttagtattatattgttatttttgtaatgaatgtatgtttataagaattgttttgattgttattaattatattatttgtaagttgataatttagatattattatcgaaaaattaaagattttaatttatattatattattatataataagatttatttagtataaaatataaatattaatatataataaattttgtattaaattaagttaagtgatatgggaagatattataattatttagatgttatagtaattgtttaatataaataatgaaatattatattttataattatataaaatataaatatagttttgtagtaattatagtatttgttttgtaataatataaattgtttgtagaataagtttgaaaattattagagattaaaatttattttaatttggtgtttggtttttaaagataaattaatatttaaataaaattaaggaaaaaatagatggtttttgtattagatttagaagaatattgattgagttaggtaagagggagaatgggtataattagggatgatgtaattaatttattaaattgtagtttagaacgaatcgtttaattagttttgtattttatttattttttttttttagaggatgtttttaaaatagaaaataaaaaaaattatattagtattttgtttttttttagatgtttttttgtatttattaaagagaaaaggattagcggttattagaaagaaaaaagaattgaagtagtagagtgtttttaaaattttgattatgtttgaaatgttattagtgttaggtaataggaaattttaagttattgttatattttatttatttatttattgtgatttatgatatagttatataatatataatgatgttttaattaataatggtggttttatataattataatatagtatttttattgtattttttttttgtttatatatatatatagttattattttttaataattgtttatagtatttaggaatatgttatatagatttgtagtttagatgtaatagtttatattatatagtttaaaggtgtggtaggttatggtatttaagtttgcgtgagtatatttataatgtgtgtataatgattagatcgtttaataatgtattttttagaatgtatttttgttaataaatggtatatgataaggatatattatataatagtatttaaattatatataatagtatttaaatattatgaatgtagaaatgttgttaaaaatatattttaattatgttttattgattttagtatatatttaattgtattaaatagaattgaaaaaataataattttgtggtttgatttttttaaaattttattattatagtagttattttatatgtaaatatatatgtatatatatatgaatattgttagaattagatatagaaatagatatatttattaagtattaagttttgaattaaatgttttagattatggattaataaattgagatatttattgggataaaaaatatttgtaggttattagatattttatgattattggtgaattaggttgatttgaaatatgatattttacgtttgggatataggtattagaatagttatttattttttttttttgagaaaatttaaattaaataaataaagataaaattaatataaatgtttagtatttgtaggattcgtttattggttgtgtaggttggattttagtaatttaattatagtatgagaaaaaataaagggaaggttttgtatattaatggatttttgttattattatgtgaatgagaattagtatttgtaattgattattttagttatataaatatattagtttttttatggtcgggcgcggtggtttatgtttgtaattttagttttttgggaggtcgaggtaagtggattatttgaggttaggagttcgagattagtttggttaatatggtaaaattttatttttattaaaatataaaaattatttgggtgtggtgttatatatttgtaattttagttatttgggaggttgaggtagaagaattatttgagtttaggaggtagaggttgtagtgagtcgagattatattattgtattttagtttggcgatagagtgagattttattttaaaagagatattagtttatttaaatgatatttgtattatattttgttgtttttttttgttatagagtttttaaatttgatttttaattttttttttattgaaaagaaatttatatttgtattatgaatttttgataaaatttagattttttttaatagtttatgttatttattaaatattattttataaatgttaaatatttatgattttgtaggttataaagattatttttgtttttgttatgtggtttaatagtttttaagttttgattttttaattttagttattttttttattataaaaaatgtaaataattttgattgtgttaatatatttagttttattagttgtatatattttaatttgttaataaattgttataataaatatgaatatatattgagtaatattgagtataaaattttttttaagttataatttttttttagatattataatgttagtttttggttttttttattgatattataaatttggtaaagagttttttatgtttattaaattttggagaaattatttggaatatatttttagttttcgttttttattttttttatagtttttattagtggtagtatgtttgttagtttttataatttgtagaataaatggtgattattatatatttgttatttaatattttgtgaataaattgtttaaattttttttagtttgtataataggattgtatagaggaagatgttatttggtaaaagggattatagaaaagataaggaaaatagaaaaggataataatgataatttattgatttttaaaagtttttaatttatttaataattttgttaagaattagttagttatgatattttagagaatatatgaatttgtattttttttttttattaaggtagaaattatatttgatgtaggtagattattgtttattgtttttttggtggagttgtatatatagttagaagtaatattaaatttggttaggataaatattttatttaaaatattagtttttttttataaagatttgataataaatatttttaaaatgaatattttttattttttattttattatttttttttttaaattgaaaattaaaatatttttgttttttatttttttttatgtaggtttttatagaagtaggtttatttgtttttataatttgtagaattattaacgattatattttaggtaattattattaataaagtataatatgttatatgtagaaggtttataaaatattatatttattttttttttaga

SEQ ID NO: 18 - DNA, 11422 bp, Artificial Sequence
  chemically treated genomic DNA (Homo sapiens)
tttgaaagagaggtaagtataatgttttataagttttttgtatatagtatattatattttattgatgataattatttaaaatatagtcgttagtaattttataaattatgaaaataaataaatttgtttttgtaaaggtttatataggaaaaaatagaaaatagagatattttagtttttaatttagaaaaaaaaatagtggaatggaaaataaaaaatatttattttagggatatttattgttaaatttttgtaaggaagagttagtattttaaatagaatgtttgttttagttaaatttaatgttatttttgattatatgtatagttttattaaaaaagtagtaaatagtagtttatttatattagatataatttttgttttggtaagaggagaaaatataagtttatatattttttgaaatattatgattggttggtttttggtagaattgttaagtaggttaagaatttttaaggattaatagattgttattattgtttttttttgttttttttgttttttttgtggttttttttgttaagtgatatttttttttatataattttattatataaattgaagagaatttagataatttatttatagaatattaagtaataaatatatggtagttattatttattttataaattgtaaaaattaataaatatgttattattagtaagggttatggaaaaaataaagagcgaaggttgaggatatattttaggtaatttttttaaaatttaataaatatgagggattttttattagatttataatgttaatagagagaattaggggttagtattataatgtttgggagaagattgtggtttaagaggaattttatatttagtattatttaatatgtatttatatttgttatagtaatttgttaatagattaaagtatatgtaattagtgaagttaaatgtgttagtatagttagaattatttgtattttttataatgaaaaaaatgattgaaattagaggattaaagtttagaaattattgggttatatggtagaagtaaaaataatttttgtgatttataaaattataagtatttgatatttatgaaataatatttaatggatgatatagattattagaagagatttaagttttattagaaatttataatgtagatgtgagtttttttttaataaaaaagaaattaaaaattagatttggaaattttgtgataaagagggatagtaaaatgtgatgtaaatattatttaaatgaattaatgttttttttgagatggagttttattttgtcgttaagttagagtgtagtggtgtgatttcggtttattgtaatttttgttttttgggtttaagtgatttttttgttttagttttttaagtagttgggattataggtgtatggtattatatttaggtaatttttgtattttagtagagatggggttttattatgttggttaggttggtttcgaatttttgattttaagtgatttatttatttcggttttttaaagagttgggattataggtatgagttatcgcgttcggttatagaagaattaatgtgtttatataattaaaatagttaattataaatattgatttttatttatataataataataaagatttattaatgtataaagttttttttttatttttttttatgttgtaattaggttgttgaaatttaatttatataattaataaacgaattttataaatattaagtatttgtattagttttgtttttgtttatttaatttagatttttttaaagaaagagaataaataattattttaatgtttatgttttagacgtagggtattatattttaaattagtttaatttattaatggttataggatatttagtgatttataagtattttttattttaataaatattttaatttattaatttatggtttggagtatttggtttagggtttgatatttaatggatatatttatttttatatttaattttaataatatttatatgtatatgtatatatatttatatataaaatgattgttataataataaggttttaaaaaaattaagttataagattattatttttttagttttgtttggtataattagatgtgtgttaagattaataaaatataattaaaatatatttttagtagtatttttatatttatgatatttaggtattattatatataatttaggtattattatataatgtatttttgttatatgttatttattgatagggatatattttaagaaatgtattgttaggcgatttaattattgtgtatatattataagtgtatttacgtaaatttagatgttatagtttattatatttttaggttatatggtataggttgttgtatttaggttataaatttgtataatatgtttttgaatattgtaggtaattgttagaaaatggtaattgtatgtgtatgtaaatagagaaaaggtatagtgaaaatattatattataattgtataagattattattattgattgaagtattattatgtattgtatgattgtattataaattatagtaaataaataagtaaaatataataatgatttaaagttttttgttatttgatattaataatattttagatataattaaagttttagaggtattttattgttttagtttttttttttttttgataatcgttaatttttttttttttaataaatgtaggagagtatttggagaaaaataaagtgttagtatgattttttttattttttgttttgaaaatattttttgggaagaaaaagtgaataaggtgtaaagttgattgggcggttcgttttaagttgtaatttaataaattaattgtattatttttggttgtatttatttttttttttgtttagtttagttaatgtttttttaagtttaatgtaaaagttatttattttttttttgattttatttgaatattagtttgtttttagaaattaaatattaaattgaaataaattttggtttttgatagtttttaaatttgttttataaatagtttatattattgtaaagtaagtattatagttgttataaaattgtatttgtgttttgtgtaattatgaaatgtgatgttttattgtttatgttaaatagttgttataatatttaaatggttgtaatatttttttatgttatttaatttgatttaatataaaatttattatatgttgatatttatattttatgttgagtaggttttgttatataataatatggtatgaattaaaatttttaatttttcgataatgatatttgagttattaatttgtaaataatgtaattggtaataattaaagtaatttttgtaagtatgtatttattgtaaaaatgataatataatgttaatttatatgtattgttgtagagtgttatatgatatattatttaatgtgtattttaatataaaaatatgtagatgtttatatattgttagtgtattgtaggttaatgtttttatatttaattgtagtattttattttttaaataagtattattttgttttttttataatttggtattatttattttaatatgttattttgtagttttgttattaaaagattttaaaaattttgatatgtttattatgtaattgagtaatcgaaagagaaataaatgaaaatagaataaaaatattgagtttatattttaaaatttttattaatgattaggatatttaataaaatattatcgttttttttttttttaattttattattattatattttaagttttagggtatatgtgtataacgtgtaggtttgatcgttttttttttaataaattttggtgtaattggatattgttttatatgattttgagagaatatagtagtataaatattattataaaaatggggtatatttttataaatatagttgtgtatttgaatttagattaatttgtttattaaaatagtatttaatattggaaataaagataggagtttttgtttggaatttagattattttagtttttgaggaattgagtttttgaggaatttgagtttttgaggaattgagtttttgtttggaattaagaaaatttattggtaatttttgaaaatgttaaattgttataataataatttttaaataaaaaaggtgataaatttttttttgtatttttaatttaattttgaaagtattattaatattttttagttgattttaataaaaaatattaaatgttatattataagatgtgagtgtgataaaataatttgtataaagagttattttttgggatatttgaatattaattagatttttaaaataagggataagttaagaatttttaaaagatgtttaagtaaatatttaaaatattttttttgtgtataatttttttattttttaaaaagttataattaaataaatatttatttttatttggaaataaatttttttaaaatggtagagaaagagttatttagataatattaatatgatttagaataagtttttttaaatgtatttgaagaaattggaataacgacgtttttatattaaatttaaaaagtttgttttgttgtagattaagtgaagtggggaattgaggaagtttgattataaatagattatattattgttttttagggattttttagttatgttttaggtatgtatatatatagaagatattatattagatataagaaatttaagatgttttatttgtttttaattaggaagaatatttgtaaattttattgtgtgaataatttgaatatttattagagagattttttgagttttttttgaaaattaaatttttttttaggttgttatttatttaattataatttttttaatatttgggatcgtttaattttggtaagaatgagtagatgttggtaagaaattatcgaaatgaagataatatttaatgtaaatatatattatatttattaagaaatgattcgaagaaggaattaaatttatagataagatgtgatttgtttagttattagtagtttatgttttataaaaatgaaatatggaatatattttaaatatatttttataattaaaaaattaggataatataaataaataataataataaaaaattaggagaataaaatagaattttgataatttaattagaaatttatttggtatttaaaagattattttattttatatttagagaaaattttgaagatttttatttaaatgttaaagttatattttaaaagtttacgtttatttttaaataaagtaattatttatataagtaaattgttattgtatttattgtaattatgagatagtttatattaaggaaggtattatatagattagtgataggagtttttaattgagtttattattatgaaatatatttataaaaatgtagaagatatatttataaaataaaaatatataataaatagaaattataaataatgaaattatattttagtttatttttagttatttatagattttataatttttaatatttaattttttggttaaagtggaattgatgttattaaaataatagttttataagattataggatgagtagaaagtatatttgtttattatttttataatagtaaaataatagtaaatgtaaaatattttgttataatttaaataaatatataaaaagtgaatataaagggtaaaggggatacgtttataaattattgtaaattaaattagaaaataggttttgtttttatttatataaaataaatagattttttatttgttagttgttattgttaaagttttaggtgataaaatgttgattgagaaaagtattttgtttaggaaaaagtaagttaattattaattttattttatttaaaaagaaaaaaaaaggaagattaattaaagattatttttatagagagatttaataaataatgtatttaagggtaagttagtatgaaatgtttttttttaggaaatttattaagaatatatattatagtgattttatacgtgttatggttttttatatagagttgaataaatttattatttttttagtagttaaataaataaagtttgcgttttttgaataataggaagatttgatgtatgtgtttgttggtttattttttttgttttatttgtaagttttagtaattgttttttatagagtattaaagggatataataaatatatgaagagattatttttattttatagaatgagttttatagtaatttggatttttatacgaaggtgtaaatttagagtaatttattcgattttttgtaataaagatggtaaagtttgtaaggagtgaaaattatgtaatatttcggggaaatgtaggatgtagttgttgttttagtttgtaaattggattgtattgatatttagtgttattgaatgtaataattaattgttattgataaagttcgcgagagttggtagtagtaatttgaaatttgtttagaggttaatggtataaatgtaatagtgatttatttatagaagtattataggatttatgttttataattgtaggtagttttttaagaatgaagaaaaaaagtatagaagattttttaattaaaataatttgaaatgtaatagaaaatgtatgttttttttaattttaaattttaaaaaaatttttttttttttaagaatatatatattttttatgtttgttttaagatttaaagacgtatatattattttaaagtagtgttattattgaaatttattatagttttaatttgtgttaattatatagttagagaagatagtaatatagaaaataagaaatataatgttttagatataagttatgtaaattaaaaatttagttttattaattgaatggatgtttttgatatgtatttttttttaatttttatattttaatatttatttaagttatataaattttagtattggtaattttttatttagaagattttgtaggtagttatatatgatgagaagttataattttttggttaagataggaaaaataaaatgaataatttttattaaattttataaaagagatatatttgttaatttgtagtgtatatgttttggagaatatatttatgtttttggcgtttattttttttgaaatgatgtttaggaaaataattttttaaaaaatttttgataaattttttaatttttatttttttaatgtaatatatttttaattttttgtaagtgatagtttttatttttgaattttttatttgtgggttttttatggattaaatagaaggtatgtattaatatttgtaggtgagtatttttttgttttttaatagagtgttaaatttttaaataagtaaatataattagtatttgttgtaattttattttatgttagttattataattgataatttatattaaatattttatattattttagtaaatatgagagttaatattattaattattttattagatgagaaagttaaggtttttataaattagaagtttattatattttttattattagtagttgttggaaaatagaattttaatttgtattattttgttattttatgttaattgtttttaagagaataattattttggttttttaaaattattttttttgtgaaaattgttatttaggtagtgttaatttaatgataaatattatgattataataatttataatgtatttagaatatagtttatgtaataataagttagttatataaaaggtatagaatatataatttatttgaaaaggagaaaaaggaggtggagtatagtggtttatgattgtaattttaatattttaggaggtttaagtgggcggattgttttagtttgggagtttaagataagtttggataatatagtaaaatttaatttttgtaagaaaatgggttagatatggtggtgtaagtttatatttttagttatttgggaggtagttgaggtaagagtattatttgagtttaggaggtcgaggttgtaagttacgattgtgttattgtattttatcgtgggtgatagagtgagattttgttttaaaaaaaaattaattaataaattaataaaagtaggaaaaggttttttaaatggaagtatattgataaatttgtaatggtttttatagtgatggtatttttgtttaaaatatagtaaatttgatgttttatatgagagtttatgggtttaatatatatgatttttaaaaatttaaatgttaaaatttttttttttaatttaagtttattgtattgttttttgtgttagtataaggttagtttattaaacgcggtaattattaaggaatattttgtgacgttagtgaatttagtaaagtattttatatgttttttgtatttatttattgttaggtaaaatatgttatatatatatatatattttatttttatttttaaataggaagttaaataataaaataattggttttaagtagatttttatttttaacgtatgtttaaattggttaattagtaatattaattgattatataagttggtaattttttttttttttaatgtttttattttaaagaattattttttgttattgtttttgtagttttttttttcgtatgattttatagttatgttatattagtttatttattattttagtgtatttttaaagtatttattttttttgttttgagagttttttttttgtggtttaatttatagtagttgttttgtttttgtggtgttattatttttttatatttatttagcggaaggatgtaggttatatatagtgagtttgttttagggttagtagggaagtattattttattatattatagtatggatggttaatgattttgttgttaaatgttgagtatgttttgtaagcgatattgatgaaatattataagatatttgatacggtattaatattgcgtatattttgtaattatatatgttgaagtttgggtaggataattattatggttttggttttatgattatttttagttagttagttatagtggttttttgtttttaaggttttattgtaatttagttattattgttttttagatagtagtatttagtaagatttgagatggtgtgaaaaatattaattttgtattatatattagttttttttaggtatattgatgttaaaaaagtgttttaaatttatattaattttatttattttttttataatagtattgtattttttgaaatgaatatggataataaagaaaagtatatataagtatagatagatagatagatagatagatagatagatagatagatagatagatagattttttttttttttttttgagatggagttttattttgtcgtttaggttggagtgtagtggtaggatttcggtttattgtaatttttgttttttgggtttaagtaatttttttgttttagttttttgagtagttgggattataggtatttattattaaatttggttaatttttgtatttttagtagatataggattttattatgttggttaggttggtttcgaatttttgattttaggtgttttattaatttcggttttttaaagtgttgggattataggtgtgagttattgtatttagtttagaaaagtatatttttatattttatatattatagagaatgaaaagattattttgtatattttaattaattttttaaaatatgtgtatgtggttatagttatatagataaatatagtggtagttaaatggtttattattattttttttgttttttattttatgatattaattttttattaaaatattttgattattgtgtgatatattattatatgggtatattatggtttattgtattttttgttatttatatgatgataataataattttaggtaataaatattatttgaaagtattattttatttattttgaatatatgaatttatttaaaatttatgattatttttaaaataagtattattattaattttattttatatttgagaaaatatagttataaagagtttaagtaatttgttttaaattatatagatatcgaggttagtttttgattttttttatgtattattataataggtattttgtatatcgatatttgagtgtattttttaattatttttttaatttatttttttagaattggaataattaaatacgatatggataaagtatatatatatatatgtgtgtgtgtatatatatatgtgtgtatgtatatatatttatatgtatatttaattttttgaaattttatatagattgttgaatagagataattttttaataattttggtaaaaaagagaaatgtttttataattagaattaatttgaatatgtttttggagtttaggtattagatttttatagttggatgtggtaggtgtttgaaggtggatatttttagagatattagaagtaggtttagagttataggtaataaaattttttagtgatgttgtagtaattaatatggaaggttttgtaggaagtgatatttgtaagggataatatatagatattttggggttaagggagagtgagtgatgggaggtttgtggtgttttttatatgaagatatagatagtttggttaaaggagttttggaaagagataataataatttggtgagatattagaatattagattttaagaatagaaagaaaattaagaaaaagtaagagtttttaaggaaatgtggtgttaagtggatttttatggaattggtaaagttagtagaattaaagtaagaaaataaattttgaattaaattgtttagggtttgagtaaaaaaggagaaatttattgttttaaaatataaaaaaagagagaaaaatagtaagtttttttgtttattatttaatttattgaattggtttaaatttattttttttaaatttttgattatttttggagttttatttttagaaaaattgtaaagtaatatattattaaatttattaaagtgttatttaaatatttagatttttaggttatatttttgggttttggttttagtagatttgaggatagcgttatattattgttttttgtgaagttgatagagggagtttataaattatatattaagaggtaaagttttggagtttggatattaaggatatttttgtgttattatatatatatatatgtttttttttttttttaattgtttatttttatgtataattgtattttttgttttaagttaatttggaaatatattatatatagtttttggtagtttatttttatataatttattttaagtttttttaaaataatgttatcgaatatttttttaattttatttatatgtttatgtattaattatttgtataagtataatataatttatttaatttgtttttattgtatatgaaggttattttaaattttttttggaaatagtaatataaaaat

SEQ ID NO: 19 - DNA, 5391 bp, Artificial Sequence
  chemically treated genomic DNA (Homo sapiens)
tttttttgagatagcgttttgttttgttatttaggttggagggtagtggtatgattatgatttattgtagttttaatcgtttaaatttaagtaatttttttattttagatttttaagtagttgggattaaggtgtatattattatattggttaatttttgtattttttatagatatagggttttgttatgttgtttaggttgatttttaatttttgagtattttgtttgttttagttttttaaagtgttgggattttaggtatgagttattgttcggttagtttaaaaattttaaattattatgtaggttaaataaaacgttttaaagttgaatttgttttagtagattattaatgtgtgaattttgaagttgattattatatttagtgaaatataaggaggttttttgattaaggtaaattttggagttagtgggataatatttaagtatgaatgagttttatagaattggagaatgtttgtgttagattttagtttagatttttatttaatataaaaatttggttttttttattgaaatagaagtagttgcggtcgggtatagtggtttatgtttgtaattttagtattttgggaggtcgagttaggcggattatttgaggttaggagttcgaaattagtttggttaatatggtgaaatttcgtttttattaaaaatatataagttagttgggtatggtggttaggtgtttgtaattttagttatttgggaggttgaggtaggagaattgtttgaatttgggatgtagagattgtagtgagtcgagattacgttattgtattttagttcgggggataagaacgagattttattttaaaaaaaaaaaaaaaagaagtagttgataaatatatgttaaagattggtggatagtaaaggaggagatatagggtggaaaatttgttttgagattggttttgtttgttttaatttggtagagtggtatggaagtaataggtagaaggtatatttgtagtggtaaatggtgttgttttataggatttataaagatttttttttttttttttttagagagagttgagtatagtagtgtgattatagtttatcgtagttttaaatttttgggtttaagtgattttttcgttttagttttttgagtagttaggtttaaaagtgtttgttattatatttagttaattttttataaaattttttttttttttttttttttttttttttgtagtggtggagttttattatgttgtttaggttggtttttaatttttggttttgaatttaaggtaggaatttttttattttagttttttaaagtgttgggattataggtaatatttttttttttaatattagagattttatattagaattttgtttttggttgttttgttttacgaggtgttatcgggttgtataatattttttttggttggaataagaaggatagaatatagaattttttttttggagaaatgtttttttgggtaggttatttgggggtaattattgggaaatcggttttattttgtatttttttattatgtttatatgggggttgagtgtatgggtgtgaattgttgggtggaaatttggtaataagggtgttattttgatgatgaggatagagtaggaggttagtaaagagatgatgatagaaatttttgggtatggggtggagaaatgtaatcgttagtatggaaagggtggtaatagttgtaaaattggttttttttattttttttagtgattttatttttttttgagtttttatttttgtaattgtattttttttgatatatatttaattttttatttgtattggttttttttttttattttttagtagatataaatttattttttttttttaaagagtttttttaatatttattttttttttaatttattacgatgtggtttttgtttattttttttttttattaaaattgttttttttaaggttgtttgtaatttagttgttaaaattaattttatttgattttttgtagtttttaatttaatttattgttttttttttgtttttttgggattttaggatataatttttcgggttttttatttcgttgattgatttttttatttttgttggtttttttgtttttatttatattttaaatattattatttttagagttaatattatttttatatggtatttttataagaagttgtgaaaggggttaggcgtggtggtttatgtttttaattttagtattttgggaggtcgaggtgggtagattacgaggttaggggtttaagatcggtttggttaatatggtgaaatttcgttttttttaaaaatataaaaattagtcgggtatggtggtgcgtgtttgtaattttagttatttaggatgttgaggtaggtaaattgtttgaatttaggaggtggaggttgtagtgagtcgagattatgttattgtattttagtttgggtgatagagtgagatttattttaaaaaaaaaaaaaaagtagtgaaaggtatattatattttgtgtatagtttgggttagggtgtatggtttggtaagtagagtttggattgtattttagtttttatttattatatttagtttggtgtttttgtgttatgaatattttgtgtaattgtatattgtagtttagggtattatttgtggtttttatttttttattgttttattttttttttttttgtaattttgttgatttttattgttttatttcgaatttatgtgttttatttaatttttagatatttttttatttacgttttgaatttttttttttgggtgttttgtggggtattttaattttgttatggtttaaatttagtttagatttgtatatttgtaaatatgtaaatatgtttatttttttgtatgtttttttttggttaatgatattattttttatttttttatttcgttgaaaattttaagattattaatgtttttttttttttcgtaatgtaaggtttttgtttttttttaagtttattattggaagaattttttaattagtttttttatttttagagttttttttttttaaattattttttttattgttattaggtttttttttttatatagatttgagtatattttttttttgttttaaaatttattttgttttttaattaattataagataaagtttagatgtttaggtattgaatataaaattttttatattttggtttaaatttataaaatttttttagttttatattttgtttttgtttttaaaatatgttttgtttttagttatattcgattatgatgtatttttttttgaatatgattttatttattgcgttttcgttggtgttttgaatgttttttttttgttttttgatttgtaaaaattttatttattttttaagattatgtttttttgttatttttatttttaggtattttttggttttaattgatagtgttttttttattgtttttatagtttatagtattattggtatgttattatagatagtttaaaagttgtttagtattttttttttattatattgagttttttaacggtaagattaagttttgttcgtttttatgttattagtagtttgtttagtgtttagtatatgttagatattgaataaaaatttatgatttgaattgggtaggatgtttgaatattattttgtgaaaggattagtgatttttttttgtataatttttagtttttttttttttagatattgaaagaattttagaataggatggttgatgggtttatttaagatagttgttatgttatagttttaatttttagtcgagtttttttagggatatagaaatcgtgtttttttaaatgattgattggtgtttgagtatggatttttttagatattagagttttttagaattgcgatgatttttaatttaagaagatttagattttaggttatatatatatatatttaattttatcgttttgaatagtagatatagggttttagtgtttttgttttattttttgtgggttttattttagtattttattaagggttgagattttagggtatgaaatacggaattaataaaaataaggtttttataattttaaaattttgggaaattgttgagttattttgaaagtttagagggggagtattagttagttttgtagagaattcggcgaaataatattgatgtatacggttagtttttgttatttttttgagttaaatttaacgggatatgttggattatataggagttattcgtggatttcgtgaagattagatgggtagtgtttttgaaatgagtagatgtttatttgtagaattttggtagtagttttggagtgggtggggaagagtttggtttttatttttttttaaagataattatttgtttttgatgagaatttaagtaataagttgttattgagaatgtagtgattggttagtaaacgaagtttataggaagagttttcgggtgtattttttgtgatatatcgattcgttttaagttcgacgtttaattatgggattttttagtttttttttttcgtttcgagtttttttttggttttttataaggttttttggggacgatttttcgatgttagagtattgggggtttgggtttatagggaattcgttagtttttttttttggagcgggtttgatttcgggaggcgttcgcgcggttcggaggcgggaatttagggggagaaggcgtcggcgtcgttttggcgcgtagattatttgtgcggttttgcgcgggggtaggcgcggttttagttttcgggcgttggcggatttagcgcgttagttaggtcgttttcgtcggtttttttcgggcgggttagtttcgacggcgttgatttagtaacgcgaggggggagttttgttttttcgcggatttcgttttttttagttttagttttttcgtcgtcgtcgtcgtcgtcgtcgtcgagtcggtttttttttttcggcgtttcgggtgcgagagataggtcgggttttttaggtagcgagtcgtagcgtaatttcggcgttcgtttaaggattttggaagttatcgttatttcgtcgggtagcgtgggcgttatgagtagttcgggtgaggtgtcgtcgtttttcgtcgcggttttttggaggagtttcgcggttttcgtgaggttcggcggcggggaaggtcgggggttgggatttttggcgatggcggggagggagttttcggggtaggttggatcggtttggagggagatagttttttggaggaggatgtcgtttatgggttttttcgttgtagcgggtattttaggatgcgtttacgaagttagattcgggacgcgggagttttagattagttttttttttttttttttgcgttaaaattttgtttggttttttaatagg

SEQ ID NO: 20 - DNA, 5391 bp, Artificial Sequence
  chemically treated genomic DNA (Homo sapiens)
tttgttgggagattaaataggattttaacgtaaaaagagggggaaagggttgatttggggttttcgcgtttcgaatttaatttcgtaagcgtattttggggtgttcgttgtagcggggaaatttataagcggtatttttttttaaggagttgtttttttttaggtcgatttagtttgtttcgaaagtttttttttcgttatcgttaagggttttagttttcggtttttttcgtcgtcgggttttacggggatcgcggagtttttttagaggatcgcggcgggggacggcggtattttattcgagttgtttatggcgtttacgttgttcggcggggtaacggtagtttttagggtttttgggcgagcgtcgggattgcgttgcggttcgttgtttagggggttcgatttgtttttcgtattcggagcgtcggaaaaaggaaatcggttcggcggcggcggcggcggcggcggcggggaggttgaggttgggagaaacggggttcgcggagggataaaatttttttttcgcgttgttgagttagcgtcgtcggggttggttcgttcgggggaggtcgacgggggcggtttagttgacgcgttgggttcgttagcgttcgggggttgaggtcgcgtttgttttcgcgtaggatcgtatagatggtttgcgcgttagggcggcgtcggcgttttttttttttaggttttcgttttcgggtcgcgcgggcgtttttcgggattaggttcgttttaaggagggaggttgacgggttttttgtgggtttagatttttagtattttagtatcggggaatcgtttttaggaagttttgtgagaagttaaaagggagttcgaggcgggagggaggagttgagaggttttataattaagcgtcgggtttaggacgggtcgatatgttataaggaatgtattcgaaggttttttttataggtttcgtttgttgattaattattgtatttttaatggtaatttgttgtttggatttttattagaagtaaataattgtttttgagggggaatgggaattaagtttttttttatttattttaaagttattattagagttttataaatagatatttgtttattttaagaatattatttatttggtttttacggagtttacgagtggtttttgtatagtttagtatgtttcgttgggtttaatttaggaggatgatagaggttagtcgtatgtattaatattgtttcgtcgagttttttataaaattaattgatgttttttttttaggtttttaagataatttaatagttttttaaagttttgagattgtaaaaattttgtttttgttgatttcgtgttttatgttttgaaattttagtttttagtaagatgttgggatagaatttatagagagtaaaataaaaatattgaaattttgtatttgttatttaaaacgatgaggttgagtgtgtgtgtgtgtaatttagaatttaggtttttttagattgaaaattatcgtagttttaaggaattttgatatttggaaaaatttatatttaggtattaattagttatttgagaaagtacggtttttatgtttttagagagattcggttaaaaattggggttataatatagtaattattttaagtgggtttattaattattttattttgaggtttttttaatatttgaaaaagaagaggttgaaaattatatagaaagaaattattggtttttttataaaatgatgtttaagtattttgtttaatttaagttataaatttttatttagtatttaatatgtattaggtattggataaattgttgatgatatagagacgaataaagtttaattttgtcgttaagaaatttaatgtagtaggaaagagatgttaaataatttttagattatttgtagtagtatattaatagtgttgtagattgtagaagtaatgaggagagtattgttaattagggttaaagggtgtttgaaaatagaagtgataagagagtatgattttgaagagtggatgagatttttataagttaaagaataggagaagggtatttaaggtattagcgaaggcgtagtgaataaaattatgtttaagaaagggtgtattataatcggatgtggttaagagtaaggtatgttttgggagtagaggtaaggtgtaggattggaaaagttttgtaggtttgggttaagatataaagggttttatgtttaatgtttgagtatttggattttattttatggttaattagaagataaaatgggttttgaaataaaggaaaaatatgtttaagtttgtgtaaaaaaagaaatttggtggtagtggggagagtaatttggaggggaggggttttggagatagggaaattggttagaaggtttttttagtagtgaatttgggagaggataaaagttttatattgcggaaagggaagaggtattgataattttgaagtttttagcggaataagaagatggaaggtggtgttattaattaagagagggtatatagaaaaataggtatatttgtatatttgtaagtgtgtagatttgaattgagtttgggttatagtaaaattaggatgttttataggatatttaggaagagaagtttaggacgtagatgaaaagatgtttagagattagatgagatatataggttcgaggtggaataatgaaagttagtagggttatagagggaaagaggatagagtaataaagagatgaagattatagatagtgttttgggttgtaatgtgtagttgtatagggtgtttatggtataagggtattaggttgagtgtggtgagtagggattaaaatgtagtttaggttttgtttgttaagttatgtattttggtttaggttgtgtatagagtatgatgtattttttattattttttttttttttttgagatgagttttattttgttatttaggttggggtgtagtggtataatttcggtttattgtaatttttattttttgggtttaagtaatttgtttgttttagtattttgagtagttgggattataggtacgtattattatattcggttaatttttgtatttttaggagagacggggttttattatgttggttaggtcggttttgaatttttgatttcgtgatttgtttatttcggttttttaaagtgttggaattaaaggtatgagttattacgtttggttttttttataattttttataaggatgttatatgggagtagtattagttttgaaaatgataatgtttaaagtatgggtgaagatagaggagttagtagaaatagaaagattagttagcgaagtaggagattcggggagttatgttttggaattttaggaaggtaaggagaggatagtgaattgaattaaaagttgtagaaagttaagtaagattggttttggtaattgggttataggtaattttagagagggtagttttagtggaagggaagggtgggtagaagttatatcgtaatgagttgagagggaggtaaatattagggaagttttttggggagaaagggtaaatttgtgtttattggaggatgagaggaaggaattagtatagatgagagattaaatatgtgttagagaggatataattgtaagagtaagagtttaggaggagatggaattattggggaaggtggaggggattagttttatagttattgttattttttttatattggcgattatatttttttattttatgtttagagatttttattattatttttttgttggttttttgttttgtttttattattagggtggtatttttattattagatttttatttagtaatttatatttatgtatttagtttttatatgggtatggtgaggaggtatagaataaaatcggttttttagtggttatttttaaatgatttatttaggaagatatttttttaagaagaaaattttgtgttttattttttttattttagttagaagagatgttgtatagttcggtgatatttcgtgggataaagtaattagaaatagaattttagtatgaagtttttaatattaaaaaagaaaatattgtttgtaattttagtattttgggaagttgaggtgggaggatttttgttttgagtttaaggttaggagttgaagattagtttgggtaatatagtgaaattttattattataaaaaaaaaaaaaaaaaaagaaagaaaaagttttataaaaaattagttgaatgtggtggtagatatttttagatttagttatttaggagattgagacgggaggattatttgagtttaggagtttgaggttgcggtgagttatgattatattgttgtatttagttttttttaaaaagaaagaaaagaaaatttttataaattttgtgaggtagtattatttgttattgtagatatgttttttgtttgttgtttttatgttattttattaagttaaagtaaataaggttagttttaaggtaaattttttattttgtgtttttttttttgttgtttattaatttttgatatgtgtttgttaattattttttttttttttttttttgagatgaagtttcgtttttgtttttcgggttggagtgtaatggcgtgatttcggtttattgtaatttttgtattttaggtttaagtaatttttttgttttagttttttaagtagttgggattataggtatttggttattatatttagttaatttgtgtatttttagtagagacggggttttattatgttgattaggttggtttcgaatttttgattttaggtgattcgtttggttcggttttttaaagtgttgggattataggtatgagttattgtgttcggtcgtaattatttttattttaatagaaaagattaggtttttatgttgaatggaagtttaggttagaatttaatataaatattttttaattttatgaaatttatttatatttaagtgttgttttattaattttaagatttgttttggttaggaagtttttttatattttattagatgtgatagttagttttagagtttatatattggtagtttattggagtaaatttagttttgagacgttttgtttggtttgtatggtaatttaaaatttttgagttggtcgggtagtggtttatgtttggaattttagtattttggaaggttgaggtaggtagaatgtttaggagttggagattagtttgagtaatatggtaaaattttatgtttataaaaaatataaaaattagttagtgtgatagtgtgtattttagttttagttatttgggagtttgagatgggagggttgtttgagtttgggcggttgaggttgtagtgagttatgattatgttattgttttttagtttgggtgatagagtaagacgttgttttaaaagaa

SEQ ID NO: 21 - DNA, 7011 bp, Artificial Sequence
  chemically treated genomic DNA (Homo sapiens)
aaaaatttgtttttgatgagtacgtttaaggtattttttttcgaatgttagtttttgagaatgcgaattatgagtgtaaaatggttatgtatttcgtttaataataaaatttatttgatcgtgaggtgttgtttgagtatattaaatatgaaggtattggattagatataaagttattttgtgtttataaagttattttgtgggtacgggttatgaaggacggtaattaaattggttcgattgattttttttttggagtttgttataattgtggttaatttggttatattcgaaaaaattgtatagttaaaaatttaaaggtagttaagtcggtttaaaaaatatagttaaatgtttttgttattgtttgtttttgttgttgtaaaggtaaatattgggtaagtatttgttattttaagtttgatatagatggaaattttttgttatagaattagggaaatgggaaatggggttagttttaggttttaattttaaatgggatattttagatttagacgaatgttgtttttttgttttaatcggttttaacgtagtttttagtataaataaatttatttatagttaatttagatgtgttttagtttttttttttgttttagtataacgtttatttatgttttagagtaaggggaggggcggttaatttttgtagtattatttttttaaatttattatttaattttttgtttttaatttttagattaatatttggaaatttggaacgattataatatggggaagagggtatgtttgtgttttattaggagattattaattttttgtttgggtgtttattagaagatttaaattttatgtgaatattgataataaaaattatagggaagagacgtttacgttagagattatttttatatttggtgagatttgtgttaattttttagaaattggtacgttaaattaaaatgggtttggtttaattttttttaatggtaatagaaatttttttaattaattttattttttttaattttttttttttttttttttacgaatttaaaaattttattatttttattagtttgaaaataatatttttttatttttttattttttttttagtattggattttgtttataataggttttatttaataatttttttttttatattttttgttttattagtttttttttatattgatttatttgttatataaaattatttttgttgggtttatgtgtttttttttttatttatttaattttttatttggatggatgtttttgcggaaatttatattaatgatagtgtgtggatgtttggagttatagatgatcgttgttttatttaattaggaaaagaaggtattgtatttaatgtttttacggttataaatatttttttttgtgtttcggatatgtattttgttgtatttatttagaaatttaagtttgggttgcgtattttttggagagattagttataggggaacggggatatttggtttttagttttttttttttttttttaagataaatgaaagggggagtaataggagatattttttatttttaatataaatttgtaggaaaattatgttttaaaatttttgagggtttatttaaatttttaatttgggaagattgtgttaatttatatgtagtattattaaaaaatgatttatatggtttagtaagagattgggtattaaagggttatttgaaaagtagttgtttttttgttggaagggaatgtttggaggttatttgttttattttttattgggaggacgaggattattattttattttgtataggaggtttagtttattttgttttttaaaatgggaagataagagtattattttttgttattcgaggttttttatgatattttttattttgagtttagaatatttagaattttggaaattggttattgttatgtttagattgcgagtatgggaaggggaaatttttttttttgttgtttttattattattttttatattcgtgattttgaaatttatgataaattttttttggattatttttttttttttgatgttagtttttttttatgggattttgattggtattatgataatttttttggatttaggtatgtttttttatttttttagaattttcgggtatttcggattgtttttttacggtattaaatattgggcgttgttatcgttatttttttttttcggtattaacgtagatttaaatattttgttttgtttatttttagtttgattattatatagagttgtgttaagtttttttatatgttgttagtgggaaatattaaaatttggatgaataattaaatcgtttaatgtattaattgttatttatttatttgtgttaattttcgttttgatttaggaaaagtgtaatgttggttcgagtttgagaaggaatttggatattagtaattttatttagaatttgggaatttttttttttagtatatttaattaatgaagtgttataacgaatttttaaaagattaagagatttgtttttattttaattattgtgattatgggtttaattatagttattgtattggttattattgtcggagtggtattatattaatttatttaaatggttaattttgttaatgattggtaaggtaattttatttaaatgtggaatttttaataaggtattgattaaaaattagttaatgatttaagatagtttgttatttggtttggggattagttaatgagtttcgaatattatatgtaaatgtagttcgattgtaatatttttgatttttatagtatattatatttttataacgagattgattatgggaaatggttaaaggatattttttgggtagggaagataatttatttttggatataattaaattaaagaaataaatttttgaagttttttaagtttatttatttattgtgtttggagttgaggcgttagattaggtggtagaaagtttttttggattaaattttataatttggattaagtttattgggggttttattgtaggaaattttggaattatgtttttttgtttaatcggtttgtttttagtgtgttagattagttaaagaattttgtattaaaatcgagagaacgagtaagtttttatcgttacggtatatttatataaaaagaaagggagagatgttgcgggaagttagggattttgaatggagggattggttggagttatggtagaggaatataaattgtgaagattttattttaatatggatatttattagtttttaaataatatttttataattttttatgtttgtttttattttaattttttaattttgttatttttgtaagttgaggatgtttgttattttaggattattgtgataattgtgttaattgtataaattgattgtaagatatgtgtttgaataatatgaaattagtgtattttgaaaaagaatagaataagagtaatttttagggaataagggaaaataattataaggtttgattgtttgtagggtcgggtagaaagagttatatttttttttttgagagaggttataaatggatatgtaagtagggaagatattattaaattttttttttagtaaggagtattattattaatattttgggaaaggaatgtatttttggggggaggtttataaatagtcgttttgggaatgtttattttgtgtagttgagataaggattgagatacgttttggttttttgtagtatttttaggtttattagggtggggaaaaatttcgttttggtaaatttgtggttagatcggttttttgttgtcgaattttgtttgttgttgtttaaggtgtttattaagatagtatgtgtatcgttgaatatagatttttatttgtagttttgtttttgttttttgttttgtgatttttgttggatttttattagtggttttgtttttgttttttgttttgtgatttttgttggatttttatcggtagttttgtttttgttttttgtttttttttttagaagtatgtgatttttgttagatatttattagtagttttgtttttcgttttttgaagtatgtgatttttgtatttattttttgtttttatatttttttttttttttgaaatttttaataaaaatttgttggtttgaggtttaggtgggtattatagttttatcgatatgtgatgttattttcggcggtttagttgtaaaatttttttttttatattgtttttttttattttttagtcggttgatatttatagaaagaatttacgttgaaatattgggggtgggtttttttagtacgttagttttgttgatgagtaaagaaggtgttgatggtattttgattaataagaaatgttatgaaacggttttttatttttggtatttttagtattgatttatttttttttttttttttatcgttttttatagtttagtatttttttcgtttttatatatatgtatatttttattttggggattattaatttatagtttttatcgttgttaaaattatatgggttggagggttagggttgtatggatagttatattattgtatattagtttggtgatggagtaagattttgaaaaaaaaaaaaagaagtataaaagatttttaatagtttttgttatttgtgatttttttgaatttgttatttgtttagtgattttgattttgtaatatggaaagttttaagttttgatttttgagtttagatattattcgtattttggagttatttaagtatggggagttttttagagggtgattaattgattttttttatttagtttttttttcggaggtttgttttggagttgagttagtttttgaggaggtttttatttttatcgttttttttttttttggatatgagtttaggtttggttgggttttaggagaatttttttataaggtaagagataatataaagttaaggtgaagattagggtagttttttaaaaggtttttttgtgttttagagttgttatagtttttttattttattgttgtttattttgtttgtcggtatttagttattatgtgggagttcgtggtttttttgttgtttattttagtttatttgttttggtttaagagaaggtgttttggtgttaagtattttaagagttttttgtttttgtttttggtgggtagtttgttatttttttttagatacggttatatgtataataatttttttaagttgtagaaaaaatatggttttatttattcggttcgtatgggtattaagattatagtgattgtcggttattattagttggttaaggaggtgtttattaagaagggtaaggatttttttgggcggttttaaatggtaagtggtgtttattttttttttgttttttttattattttttgggattgtttaggtttttagattatgtttagaatggggtttttagttttaataatttgtaattttttttaaagtagattagtgggatgatgtgaagggagtgaatttttagatttttatttagtttttaaattaggtaggaagaattaaaggaatgttttttttattaggttgtttaggaggtgggatgggaggattatagtggtttgaggggttaaggaatttttattttatttttttttttgagtttagatttttttaatggattgagaaggtgtatgtatagtatttagtttagtatttagtatagtaagtgttttttatatagttaggatttatgttattttttatggaaaatgggggtagtgattattgttttttatgaaagttgttggggagaattagtttagttattgtaggttgggattgttgtttttttggtgttatttttagttatttaggtttataggggtagttttttataatgatattttagggttgttgatgagttttttatttagtagggtttttagttttttagtattttttttttttttttttttttttgagatagagtttttttttgtcgtttagtttggagtgtagtggttaattttagtttattgtaatttttgtttttcgggtttaagtgatttttttgttttagttttttgagtatttgggattataggagtatgttattatgttcgttaattttttgtatttttagtagagatggtgttttattatgttagttaggatggtttcgattttttgatttcgtgatttttttattttagttttttaaagtgttaggattataggcgtaagttattgtgttttgttagttttttagttttgattaagttaagggttggtttatttttttttggattaattagttaggtttgttgattaattatttagtttttatttttgttggttttttttcgggggtagagaagatggagaaggttagttatgtggatttttagggttaggaaatggaaaagggaggttttggatttttttgttttggggggtatttttaggaggaggcggttcggtttaagtttagattgggtagataaaatatttgtattttttaaatgtgggtttgtggttgggtatgtaggtttgtaatggaagggtaaatttgagtgaggtgagttgtgtttttagtttagttaagggtttagggaaaagtagagatttgtgtagtttttagtttttataagtttatttgttttttattttttggataggtatagtttagagagtttattttatttagagttgtttttttgtggttagaaattgatgagtaaaaagaagtttagagggtattttgttagcgaaaagaattttaatgttgttgtattttaattaagggttttttttttttttttgatttattgtatttttgaaggaattgggagtaggaggttttagggtttgttttattaagtttttgtagttatggtggagtgtagtggggttgtgtttatatgggagttagtatgttaggtatttgtttttttttttaggaaggaaagtagggattagaggtgtaagggtaagagtggggtggatggtgtgagatttttatagttttgtttgttttttaaagg

SEQ ID NO: 22 - DNA, 7011 bp, Artificial Sequence
  chemically treated genomic DNA (Homo sapiens)
tttttagagagtaggtaaggttgtaggaattttatattatttattttatttttgtttttatatttttggtttttgtttttttttttggaggagaaggtaggtatttggtatgttgatttttatgtgggtatagttttattgtattttattatgattgtaaggatttggtaggatagattttaaggttttttatttttaatttttttagaaatatagtagattaaggagaaagaaagaatttttaattagaatgtagtagtattggggtttttttcgttgatagggtgttttttgggtttttttttgtttattagtttttgattataggaaggtaattttggatgggataaattttttaaattatgtttgtttagagggtagggagtaggtgagtttgtagaggttgaggattgtatagatttttgtttttttttgagtttttagttgagttaaaggtatagtttattttatttaggtttatttttttattgtaagtttgtatatttagttataagtttatatttggagagtgtagatgttttgtttatttagtttggatttgggtcgagtcgtttttttttagaggtgttttttaaagtaaaagggtttaaagttttttttttttattttttgattttgaagatttatatgattagttttttttattttttttgttttcgggaggaagttagtagaggtgggagttaggtagttggttagtagatttggttgattggtttaagaaaaaataaattaatttttggtttgattaaagttgagaggttggtagggtatagtggtttacgtttataattttagtattttgggaggttaaggtgggaggattacgaggttaggagatcgagattattttggttaatatggtgaaatattatttttattaaaaatataaaaaattagcgggtatggtggtatgtttttgtagttttaggtatttaggaggttgaggtaggagaattatttgaattcgggaggtagaggttgtagtgagttgagattggttattgtattttaggttgggcgatagagagagattttgttttaaaaaaaaaaaaaaaaaaaaaaaatgttgagaggttgggggttttgttgagtgggaggtttattagtaattttgaaatgttattgtagaaaattgtttttgtgagtttgagtagttggaaatagtattaggaaagtagtaattttagtttgtaatagttaggttaattttttttagtagtttttatggaggatagtagttattgtttttattttttatgaaaagtaatatgaattttggttgtataaggggtatttattgtgttgggtgttaggttaagtgttgtatatgtatttttttagtttattagagaagtttaggtttagagagaggagtggagtgaggattttttgattttttagattattgtggtttttttattttattttttgggtagtttggtagaggagatatttttttaattttttttgtttaatttagaggttgggtgggggtttgaaggtttattttttttatattattttattagtttattttgggaagaattataggttgttggagttggaagttttattttaggtatggtttgaagatttgaataattttagggggtggtgaagggggtagggaggagatgggtattatttattatttgaggtcgtttagagaagtttttgttttttttaataagtatttttttggttagttggtggtggtcgataattattgtagttttggtgtttatacgaatcgaatagatggggttatattttttttgtagtttgaagaagttgttatgtatatggtcgtgtttggggaggaatggtaggttgtttattaggggtagggataggaggtttttggggtatttggtattagggtatttttttttgggttaaaataaataagttagggtaagtagtaagagagttacgagtttttatatggtggttgggtgtcggtaggtaagatagatagtagtggagtagaagagttgtggtaattttagggtataaggaggttttttaaagggttattttgatttttattttgattttgtgttattttttgttttgtggaaagatttttttggagtttagttaggtttgagtttatatttagaagggagagaggcggtgggagtgaaggtttttttaagggttggtttaattttagggtaaattttcggaggaggagttaggtaagggaggttagttgattattttttgaggagttttttatgtttgaatgattttagagtgcgaatggtatttgggtttaggagttaaggtttggaattttttatgttgtaaaattaaaattattggatagatgatagatttaggagggttataagtagtagggattgttaaaggttttttatgttttttttttttttttttagagttttgttttattattaggttggtgtgtagtggtgtgattgtttatgtagttttggttttttagtttatgtggttttggtagcgataagggttgtgggttaatggtttttaaaataaaaatgtatatgtgtatgggaacgaaaggggtgttaagttgtggggagcggtggaagggaagggagagataggttagtattaggaatgttagaggtgggaggtcgttttataatattttttgttgattaaaatgttattaatattttttttgtttattagtaggattagcgtattgggggaatttatttttaatattttaacgtaggttttttttataagtgttagtcggttgagaaataaagagagatagtataaagagaggaattttatagttgggtcgtcgggggtggtattatatatcggtaggattgtgatatttatttgagttttaaattagtaagtttttattaagggttttaaaaaggggagggggtgtaagaatagggagtaggtataaagattatatgttttaaagggcgaaaagtagaattattaataagtgtttaataaagattatatgtttttgagggaaaggataaagggtaaaagtagaattatcgataagggtttaataaagattataaggtaaagggtaaaagtagaattattgataagggtttaataaagattataaggtaaagggtaaaagtagaattatagatgagggtttatgtttagcggtgtatatattgttttgataaatattttaaataatagtaaatagggttcgatagtagagaatcggtttgattataaatttattagggcggagtttttttttattttagtaagtttgagggtattgtaggagattagggcgtattttagtttttattttaattgtataagatagatatttttagagcggttgtttatagatttttttttaggaatgtattttttttttagggtattaataataatattttttgttaggaaaagaatttagtgatattttttttatttgtatgtttatttatagttttttttaagaaggaaaatatggttttttttgttcgattttgtaggtagttagattttatggttgtttttttttgttttttaaaaattgtttttattttgtttttttttaaggtgtattaattttatattgtttaaatatatgttttataattaatttgtatagttaatataattattatagtggttttgaagtgataaatatttttagtttataaagataataggattaagagattaaagtaaagataggtataagaaattataaaagtattatttgggaattgataaatgtttatattaaaatgaaatttttataatttatgtttttttgttatggttttagttagtttttttatttagggtttttgatttttcgtaatatttttttttttttttttatataaatgtgtcgtggcgatgaaggtttgttcgttttttcggttttgatgtaggattttttgattggtttggtatattaaaaataagtcgattaaatagagaaatatgattttaaaattttttatagtggagtttttagtagatttaatttaagttgtggagtttagtttagaaagattttttgttatttgatttaacgttttagttttaggtataatggataaatgagtttgagaggttttaaaaatttgtttttttaatttagttatgtttaaggataaattattttttttatttagaaggtgttttttgattattttttatgattagtttcgttgtaggaatatggtgtgttatagaaattagaagtgttgtaatcgaattgtatttgtatgtgatgttcgagatttattagttggtttttaagttaaataatagattgttttaaattattagttaatttttgattaatgttttgttgaggattttatatttgggtggaattgttttattaattattaataaaattagttatttgaatagattggtgtaatgttatttcggtagtggtggttagtgtagtgattgtaattaggtttatgattatagtgattaaagtgaaaataaattttttgattttttgagaattcgttgtaatattttattaattaaatgtattgagggggaagatttttaagttttgggtaaagttattggtatttagatttttttttaagttcgaattaatattatattttttttgagttaaaacgggagttaatataagtggataaatgataattaatgtattggacggtttgattgtttatttaaattttgatattttttattaatagtatgtaaggaggtttaatataattttgtataatagttaggttggaggtaaataaagtagaatgtttgaatttacgttgatatcgagggggaggagtggcggtggtaacgtttaatgtttgatgtcgtaaagaagtaattcgaggtgttcggggattttgaagaggtagggggatatatttgggtttagaagaattattataatgttaattagagttttataaaggaggattggtattaaaaagaggaaaatggtttaaaggggatttattatgggttttagaattacggatgtgaggggtggtagtggggataatagaaagaaaagttttttttttttatattcgtagtttggatatggtaatagttaatttttaaagttttgggtgttttgggtttagaatgggggatattataagaggtttcgggtggtagggggtaatgtttttatttttttattttaagggatagaatgagttgaattttttatgtaaagtaggatgatgattttcgtttttttaataagaaataaaataagtagtttttaggtatttttttttagtagaagagtaattgttttttaaatagttttttggtgtttagttttttattaaattatatgagttattttttaatagtattgtatgtgaattaatataatttttttaaattaaagatttagatgggtttttaaaaattttaggatatggtttttttataggtttatattgaaagtagggggtattttttattatttttttttttatttgttttaaaggagaaagggagaggttggagattaaatgttttcgtttttttgtggttgatttttttagaaggtacgtagtttagatttgagtttttagatggatataataaggtgtatgttcgaggtatagaggagggtatttataatcgtaggaatattaaatgtagtgttttttttttttggttgagtggggtaacggttatttgtagttttaggtatttatatattattattagtatagattttcgtaggagtatttatttaggtgagaggttgaataagtggaggaaaaggtatataagtttagtaagaataattttgtgtagtaggtaaattaatgtgaggggaaattggtgagatagaaagtataaggaagagaattattaaataaaatttattgtaagtaagatttagtgttgaaggaggaatagaagaataaggggatgttatttttaggttaatagaaatggtgagatttttaggttcgtaaggagaaaaagaaagggaattaggagaagtgggattagttagaggggtttttgttgttattagggaggattgaattagatttattttgatttggcgtgttagtttttgaggagttggtatagattttattaggtatgagggtggtttttgacgtggacgttttttttttgtggtttttattgttagtatttatatgaagtttaagttttttagtgggtatttagataggggattgatgattttttggtgaaatataagtatatttttttttttatgttataatcgttttaggtttttaggtattggtttgggaattaaaggtaaagaattaggtagtaaatttagaggaatggtattatagagattgatcgtttttttttttattttggagtatagataagcgttgtattgagatagaagaagaggttgggatatatttgggttggttgtaggtaaatttgtttgtgttgggggttgcgttgggatcgattgaagtagaaaggtaatattcgtttgagtttgaggtgttttatttgaaattggggtttaggattggttttattttttatttttttggttttgtggtaagggatttttatttatattagatttagagtggtaagtatttgtttaatgtttatttttataataataagggtaaatagtagtaggagtatttggttgtgttttttgagtcggtttggttgtttttaagtttttaattgtgtaattttttcgagtatgattaagttgattataattatagtaggttttaagaaaagaattagtcgagttagtttgattgtcgttttttatggttcgtgtttatagaatagttttgtgggtatagaatagttttgtgtttgatttaatgtttttatatttaatatatttaggtaatattttacgattaggtaaattttgttgttggacggaatgtatggttattttatatttatggttcgtatttttaaaagttaatattcgaagaagaatattttgagcgtgtttattagagatagattttt

SEQ ID NO: 23 - DNA, 5788 bp, Artificial Sequence
  chemically treated genomic DNA (Homo sapiens)
gtgggggattatagaattgtataatataaagtgtattttaatttaaattatggtcgtcggttaataataatgtattagaggttgggcgtggtggtttatatttgtaattttaatattttgggaggtcgaggtgggtagattatttgaggttaggagtttgagattaatttggttaatatagtgaaatttcgtttatattaaaaatataaaagttagtcgagtatggtggtgtgtgttgtaaatttagttatttaggaggttgagttattagatttttttagatttgggaggaagaagttgtagtgagttgaaattgtattatcgtattttagtttgggaatagtataatattgtgtttttttatatgttttttatatattttttgggtagattttacgtagatagttatgtaatttgttaataaaaatagttttatttttttttttttaatatgtatgttttttattttttttttttgttttattgtattagttaggatttttattatattgttgaataggagtggtgaaagaggatatttttgattggttttaatattggggaagtgtttaattttttattattaagtattatttttttttgttaaaaaatttttttgaatttgtgttataagtatgttttttatgtaagttatagtgatttggttttgttaattaatttaaaaagattttttttttttttaaatagggttttattttgtattttaggttggagtgtagtggttaaatatggttttttaggtttaagttatttttttgttttagttttttgagtggttggggttataggtatatattattatatttagttaatatataatatatataagtgtgtataagtggagttttgttttggtgtttaggttggagtgtatggaatataatggtgtaattatggtttattgtaattttggttttttaggtttaagtaatttttttgttttagttttttgaggagttgggattataggcgtacgttattatatttagttaatttttgtatttttagtagagttagggttttattattttggttaggatggtttttaattttttgatttcgtgatttattcgttttggttttttaaagtgttgggattataggcgtgagttattgtatttggttaagaatttatattttatagatagaaatttatagtcgatttgttttttgtttttgttttgtttgttaagaggtttagaattaaatttatggtttaatttttaggtggatagattttatagtatatgttttggaagttatgtttttagattattttacgttttattttaatttttattgtttttgtttattttttttatcgtgtagttttattattataaatttttttttgaataagatttggtagaagatatattttttgtaggtttgggtttggaagtttttgaatataaatttatgggttaagatgtttttatgtttgtttttatttataatatatatatagggaagggttggtgtttatttatttgggatgaggatgtttttttttaggtagtttttagtttttatggttagttataggttcgttgggatggagtcgggagagtggaggtttgtgttggtttatattgttttttgtgtgtttgggatttagtgtgtgagtatgtgtttgtgtgtttataggttagaggtagaggaagggtaggggtttaaggagaggtagaggagaagagagaagttttggggtagggaagtagagaggtagaggagaaatagtttgggtaggggtggggggtgttgaggcggtggagtaggagataagtttggaaggggttttggggtgtttggtattgttttaggttttgttttattttggatagaggatggttgtgatagatttattttttattaagttatagtttttttagtattttgagggattttgggtatagttggttttatttttgtttttatttttatgatggtttagaagggtatttagttttaggtaatgttagttttgggtttttgaagttgagtttgtatttaatttgcgtagaggaggatattcgtattgagtttcgtttttttaaggagtttttaggtttgggatcgatatatttttagagtttgttttagtaaatatttattttatttataagtgattcgattatatttatttacgtatcgatttacgtattcgtttatgtttattaagggttgattttgttgggtttggggtatgagtagtgtatttaatagttagaaatatttttgttttcgtagtatttatattttagaaggaaggaggtagttaatgtatgagataaattagaaaaatatttattaagtcgggtgagaaatgttgatatagaaaataacgtagtaattagaaaggagttgaggggaggggaggttggaatttttaataaagtggttaaggtcgggtacggtggtttacgtttgtaattttagtattttgggaggttaaggagggaggatcgtttgagtttaggagtttaagattagtttgggtaatttagtgagattttgtttttattttaaaaataaaaaataaataaaaatttagttaggtgtggtggtgtgcgtttgtggttttagttattgaggaggttgaggcgggagaattattcgagtttgggaggtcgaggttgtagtgagtgatcgtagtattgttttttagtttaggtgatagggtgagattttgttttaagaataagaataataggttgggtgtagtggtttatatttgtaattttagaattttgggaggttgaggtgggtagattatttgaggttagaagttggagattagtttgattaatatggcgaaatttcgtttttattaaaaatataaaaattagttgggcgtggttgcgggcgtttgtaattttagttattagggaggttaaggtaggagaatcgtttgaattcgggaggtagaggttgtagcgagtcgagattgcgttattgtattttagtttgtgtgataaaagtaaaattttattaaaaaaaaaaaaaaaaaaaaaaagaaaagaagaggggtcgggagcggcggtttttgtttgtaattttagtattttgggaggtcgaggcgggcggattataaggttaggagatcgagattattttggttaatatggtgaaatttcgtttttattaaaaatataaaaaaaattagtcgggcgttgtggtgggcgtttgtagttttagttatttgggaggttgaggtaggagaatagtgtgaattcgggaggcggagtttgtagtaagtagagtttacgttatggtattttagtttgggcgatagagagagattttttttttaaaaaaaaaaataataataaaataaaaataaataaataaataaaatttaaaaaagaaaaaatatttaaaaatcgtatgttaaatggtattggggtttcgtgtcgtgttatagcgtggatcgaaaatgcggatatatgtaggttgttttttttcgtaggtagaagttatacgtagatttagattttttgtatcgtatttttttatttaatcgcgtattcgttatttttcgatagtttttttttttttattttaattttacgtcgcgcgcgaggttggttttttaagagtttcgtttcgatttttttttttttcgcgtgattgcgagttttcgcgtcgggtcggggaatgggtcggttgggtggttgcgcgggttttcggttttttttacgtaacgtttgggtatcgcgttttcgggttaggtggggcggggacgggtcgtttgatttttgttttttagagggatgtcgtcggcgtacgtaagttagtcgggggtagggtgggggtttcgcgttaggtgtttttttcgtggtttttgggttcgagttttttcgtggtttttcgtcgtcggatttttgtgttttgttaattaaagtattagttatttcgggagttaagagggatttttaagggtcggtgggttttggttggagggatcgcgcgttgtaattagtattaaggcgattttagaggttgcgaggagtcgttagtgagcgtttagcgagtttgttttttcgttatttatttcgattttttaattaagaggcgcgaattttagttagtcgttcgggttttgggggataggtttagtttcgcggcgtttttggtttttcggttttcgtgattttagggttggggtcgtagcgttttttacgcgagtcgggatttagtaatttcgggaaggaggttattacggggtagtttcgttttcgtttgtcgagttttggtaggttgtagcgttggggaggtatttgtacgtttagcgttttagtgggtgtaaaaatgacgaagaggagttttcgcgttttaggatggagtttttcgtatttttttttcgggttgttttgggattttttttttaagtttttttttcggttgggttttgtattgtttttgggacgttttggaattgggatttttaggtgtttttagtttttatttttttatgtataggtatcgagatgtgttttatagtgggtttttgtttattcgattttttattttcgtcgtttttcgttatttttttttttaattttagagagattagttcggtttaggttgtttttttttttattttagttcgttttagggaaggaggcgtggttatacgtataagttcgtttataaaggtgtagtattttatttttattttgaaggtgatagtttttggatgttttttgatttttgtgattttaggttttaagagtttattttttttagtttagtttagtattttaggtgagttgttgggggatttttggtttgtttttttttttttaataaaaggaatattttggtgtttttaggattttttaggtagttatttgtttagtatttttaaaaagggaggtttagagtgtttttagtgattaggtagtttagttttttagtggggaaattgaggttaggggaagaggaggatttgtttatggttttatagttggtattagatttttagatatagatggtattttatttaggattttaggatttaggttttagttttattttttagtgagtgtttttttgtttattttggggtttttttattaaggttatttggtaggttggaatatgtgtagttttttttttaggttttttgatgataggggtttttttttgggtggatagggtggatggagggggtgggttgggtttttattagttgtattttgttttagtttaagaagttatttttggtagattttatttttttaagggtggtttgttagtgttgagatgttttagatagttgggataatagaggtagatttgtgtaggagttttaggttttttttattttattgattattttttttgttttttgttgggagataattagggtgatagattgttaattgtagggagttggaaatattagtttttaaaaatttattagttatattttttttggttttttattattttataaaggttgtaggtttttgggatatttattgtgtagaaggggatattatagtatattaaagtttggtattgttttttgttgatttagggatttagtgtgttttgatatttagtttttttaggaagtttttttttattataatatttgtggtaggaattatttatttttttgttttgtgaggtttttttgtggggagtttaattggtaagattgttaggttttttatagtagatttgggtttttttttttttttggatttagttgggtattttgaattgagagattttgttttatttttttttagatgtt

SEQ ID NO: 24 - DNA, 5788 bp, Artificial Sequence
  chemically treated genomic DNA (Homo sapiens)
aatatttgagagagggtaagataagattttttagtttagagtatttagttggatttagagggaagagaaaatttagatttgttgtggggaatttgatagttttattagttaggttttttataggagaattttataagatagggagatggatggtttttattataagtattatagtggagggaggttttttggaggggttaaatattaaagtatattagatttttgagttaataggggatagtgttaggttttggtgtgttatggtgtttttttttgtatagtgggtattttaaggatttgtagtttttgtaagatggtaggaggttaagggagatgtgattggtgagtttttagggattggtatttttagttttttgtagttggtaatttgttattttgattgttttttagtaaaggataaagaagatggttaatgagataggaaaggtttgggatttttgtatagatttgtttttattgttttagttgtttaggatattttagtattgataagttatttttaggagggtaaaatttgttaggggtagttttttaggttagggtagggtatagttggtaagaatttagtttattttttttatttattttgtttatttaaggagaagtttttgttattagaaagtttgagggaggggttgtatatattttagtttgttaggtggttttgatggggaagttttagggtaggtagggagatatttattaggggatggagttggagtttgggttttgaagttttgaatgagatgttatttgtatttagaggtttggtattagttgtgggattatgggtaagtttttttttttttttggttttagtttttttattagggggttagattgtttggttattaaaaatattttgagtttttttttttggaggtgttagataggtagttatttaagaagttttggaggtattaaaatgttttttttattgggagagaaagggtaagttagaagttttttagtaatttatttgaggtattgagttgagttgggaagggtggatttttggagtttgggattataaggattagggaatatttaagaattgttatttttagggtgagggtgaagtattgtatttttataggcgggtttgtacgtgtggttacgtttttttttttggagcgagttgagatggagggagaagtagtttgaatcgggttggtttttttgggattggagagaaaggtggcggagggcggcgggggtggggggtcgggtgggtaagaatttattatgggatatatttcggtgtttgtatatagaggggtgagggttgggaatatttggaagttttaattttaaggcgttttaagggtagtgtagaatttagtcgaggagggggtttgagggagaagttttaggatagttcgaagagagggtacgggaagttttattttggggcgcggggattttttttcgttatttttgtatttattggaacgttgggcgtgtagatgtttttttagcgttatagtttattaggattcggtaggcgggggcggggttgtttcgtggtgatttttttttcggggttattgagtttcggttcgcgtgagaagcgttgcgattttagttttgaggttacgggggtcggaaggttagaggcgtcgcggggttggatttgttttttagagttcgggcgattagttgaggttcgcgttttttgattgaaggatcggaatggatggcgaaggggtaggttcgttgagcgtttattagcggtttttcgtagtttttaggatcgttttagtgttgattgtaacgcgcggtttttttagttaggatttatcggtttttgagggttttttttggttttcggggtggttagtgttttgattggtagagtatagaaattcggcggcggggggttacggaaagattcgggtttagggattacggagggggtatttggcgcggagtttttattttattttcggttagtttgcgtgcgtcggcgatatttttttagggggtagaggttaggcggttcgttttcgttttatttggttcggaggcgcggtgtttaggcgttgcgtgagaaggatcggaggttcgcgtagttatttagtcgatttatttttcggttcggcgcgggggttcgtagttacgcgaggggggagggagtcggggcggggtttttaaagggttagtttcgcgcgcggcgtggggttggggtggagggagaggaattgtcgaagggtggcgggtgcgcgattgaataaggggatgcggtgtaaagggtttaggtttgcgtgtggtttttgtttgcgaggagaggtagtttgtatgtgttcgtattttcggtttacgttgtggtacgatacgaagttttagtgttatttggtatgcgatttttagatgtttttttttttttaaattttatttatttatttatttttattttattattatttttttttttggagagggagtttttttttgtcgtttaggttggagtgttatggcgtgaattttgtttattgtaagtttcgtttttcgggtttatattatttttttgttttagttttttaagtagttgggattataggcgtttattataacgttcggttaattttttttgtatttttagtagagacggggttttattatgttagttaggatggtttcgattttttgattttgtgattcgttcgtttcggttttttaaagtgttaggattataggtaagaatcgtcgttttcggtttttttttttttttttttttttttttttttttttttggtggaattttgtttttgttatataggttagaatataatggcgtaatttcggttcgttgtaatttttgtttttcgggtttaagcgatttttttgttttagtttttttagtagttgggattataggcgttcgtagttacgtttagttaatttttgtatttttagtagaaacggggtttcgttatgttggttaggttggtttttaatttttgattttaggtaatttgtttattttagttttttaaagttttgggattataggtgtgagttattgtatttagtttgttatttttatttttgagataaggttttattttgttatttaggttggagggtagtgttacgattatttattgtagtttcgattttttaggttcgggtgattttttcgttttagtttttttagtagttgggattataggcgtatattattatatttggttaaatttttatttattttttatttttggggtagagatagggttttattaggttgtttaagttgattttgaatttttgggtttaagcgattttttttttttggttttttaaagtgttgggattataggcgtgaattatcgtgttcggttttgattattttattgagaattttagttttttttttttttagtttttttttgattgttgcgttattttttatgttagtattttttattcgatttagtagatgtttttttgatttattttatatattgattgtttttttttttttagaatgtgagtgttgcgaggatagggatgtttttgattgttgggtgtattgtttatgttttaggtttagtagagttagtttttggtagatatggacgggtgcgtgggtcgatgcgtgggtgggtgtgatcgggttatttgtgggtggagtaggtgtttgttaaggtagattttggggatgtgtcggttttaaatttgaggattttttggaggaacgaggtttagtgcgggtgtttttttttacgtaggttgagtataagtttagttttaaaggtttaaggttggtattgtttggggttggatatttttttgagttattatggaggtgagggtaggggtgggattagttatgtttagggttttttaaagtgttggaggggttgtgatttggtggggagtgggtttgttatagttattttttgtttagggtggggtaaggtttgggatagtgttaggtattttaggattttttttaggtttgttttttgttttatcgttttaatattttttatttttgtttaagttgttttttttttgtttttttgtttttttgttttaggatttttttttttttttttgtttttttttggatttttgttttttttttatttttgatttgtgaatatatagatatatgtttatatattaagttttaggtatatagaaggtaatgtggattagtataaatttttattttttcggttttattttagcgggtttgtggttggttatgagaattgggggttatttggagggaagtatttttattttaggtgagtgggtattagtttttttttgtatgtgtgttgtgggtggaagtaggtatgagagtattttagtttataggtttgtatttagggatttttaaatttagatttataaagagtgtgttttttattagattttgtttaaaaaagggtttgtgatgatggaattatacgatagagggagtgagtaagaataatgaggattagagtggagcgtgaaatagtttaggagtatggtttttaaaatatatgttgtgaggtttgtttatttgagagttgggttatggatttaattttgagttttttagtaggtaaagtaaagatagaaagtagatcggttgtggatttttgtttataaaatgtgagtttttggttaggtgtagtggtttacgtttgtaattttagtattttgggaggttaaggcggatgaattacgaggttaagaggttgaaaattattttggttaaaatggtgaaattttgattttattaaaaatataaaaattagttgggtgtggtggcgtgcgtttgtagttttagttttttaggaggttgaggtaggagaattgtttgaatttgggaggttaaggttgtagtgagttatgattgtattattgtattttatgtattttagtttgggtattagagtaagattttatttatatatatttatatatattatatattagttagatgtggtggtatgtgtttgtagttttagttatttaggaggttgaggtaggaagatgatttgagtttggggagttatgtttggttattgtattttagtttggggtatagagtgagattttgtttaaaaaaaaaaaaaatttttttagattggttaataaagttaaattattgtggtttatataagagatatatttatggtatagatttagaaagattttttaataaagaagaatggtatttaataatgagagattaaatatttttttaatattggaattagttaagaatgtttttttttattatttttatttaataatgtagtggaagttttaattagtataataaaataagaaggaaaaataagagatatatatattggaaaggaaaaagtaaagttgtttttattaataaattatatgattgtttacgtagaatttatttaaagaatatatagaaagtatatagagagatatagtgttgtgttgtttttaggttgaagtgcggtggtataattttagtttattgtaattttttttttttagatttaaggaaatttggtggtttagttttttgagtagttaaatttatagtatatattattatgttcggttaatttttgtatttttagtatagacggggttttattgtgttggttaggttggttttaaatttttgattttaggtgatttgtttatttcggttttttaaagtgttgagattataggtgtgagttattacgtttagtttttgatatattattattaatcgacgattatagtttaaattaagatgtattttgtgttgtatagttttatggttttttat

SEQ ID NO: 25 - DNA, 6359 bp, Artificial Sequence
  chemically treated genomic DNA (Homo sapiens)
tgggaggcggaggttgcggtgagtagagattgtgttattgtattttagattgggtgatagagcgagattttattagaaagaaagagagagagagagagaaagaaagaaagaaagaaagaaagaaagaaagaaagaaagaaagaaagaaagaaagaaaaaaagggatttaaaattttgtttttttttattttattttattattttttttgagacgagttttgttttatggcgtaggttggagtgtagtggcgcgattttggtttattgtaatttttatttttggggtttaaaggatttttttgttttagttttttgagtagttgggattataggtatgcgttattatggtcggttaatttttttgtatttttagtagagatggggttttattatgttggttaggttggtttagaatttttgattttaagtgattcgtttatattagttttttaaagtgttgagattatagatgtgagtttttatattaggtttgagattttgttttaaaataataataataataattagaatgtattaatatttatttacgaattgtaataaatatattatattattgtaagatgttaataataggggaaattgtagagtgggggtggtaaatggttatttttattttttttattatattttttatttaatttttttgtgaattaaagattgttttaaaaaaatttattagttttttaaaattttttggtttttttttaaaaagtgtatatatgatatgattttatttatgtaaaatataataagtaaaataaatttatgtaatagatgttggggttatgggtatttttgagaaaggaatataacgggattttttggatgtttatgatgttttttgattagagttggttatatgtgtgtttgttaagtttgtaaaaatttattaagttatatatgatcgagttatatatgatatatgtatttttttatttatttatttatttttgagatagaattttgttttgttatttaggttggagtgtagtggtgcgattttggtttatcgtaattttcgtttttcggatttaagtaattgttatgttttagtttttcgagtagttggaattataggtgtgtattattacgtttagttaatttttttttgtatttttagtagagatgaggttttattatgttggttaggttggttttgaatttttggttttatttaagtgatttttttatttcggttttttaaagtgttagaattataggtgtgagttatcggttttagttgatatatgtatttttttatattgtattttgtaatttaatttttttaagttttaagaaaatattaaaaataaaaagataaatagtttgttatataggagaattttaaatagtttatggagataatttttttttaaggagaaggagcgtaattttttattttttcggtgtgggttgtgtatagtgatttttttttaaaaggtatagtatggaaaggtgggaaaggagtaattttatagtgaagagatttgatacgtattattttagttaggtgattaaggttaatatttatatttgtaagttatattgataggatgtaattttgatatgatgtgacgagaatggtatttaatttttaaggtttttttattaataaattataattttaggtttattatgagaagaaaaatattaggtatattttaatagtgggtattttataaaatgtttaattagtatttttgaaaattgttaaggttattaaaaataaggatattttgagaaattgttatagttaagaggaatttaaagagacgtgatgattaaatgttatgtgatatttaatgggttttggaataggaaaaggatattaggtaaaacgtaaggaaatttaagtaaattatgaattttagttaattagagagatagatagatagagagaaagaaagagtttattttttataaaatcgagtttaattttaaattttgattttttttattgagttatttgaatttaatggagatatagataggaaataatttttttttttttttatttatggtttttaaatatgttttgtttttttattggattttttatttatttgttttggtatttttataggttgattttatagtttttttatttttaggaataaaagtttattttagtttaaattaaaattttttttttatatttatgtcgggtatagtggtttatatttgtaattttagtagtttgggaggttaaggtagaaggattgtttgggtttagaagtttaagattaatttgggtaatatggtaagattttttttttataaaaaaatgtttaaaaataaaaaaattagttaggtatggtgtatatatttgtgattgtggttttagttatttaggaggttgaggtaagaggattgtttgagtttaggaggtcgaggttgtagtgagttatgattgtggtatatgaattttaatttgggtgatagagtaagattttgtatttaaaaaaaaaaaaaaaagatagtaaattttttttttatatttaatttaaggtttgttttttttttttttttagatttgattgagatttgggtttatattaaagatttttttagtataataaatattatatatttttacgtaagtttatgaatatttgatattttttatatttattttttttcgatttattgatagataggtatatattgttttaattttatgggtatatagtaggtgtatatatgtatggggtatatgaaatgttttgatataggtatgtaatatgaaataagtatttatggagaatggagtatttatttttttaagtaaggataaatttttgagttataaataatttaattatattttttaaaggtgtatattttttttttttttgagacggagttttattttgtcgtttaggttggagtggagtggtacgattttggtttattgtagtttttattttttaagtttaagttatttttttgttttagtttttcgagtagttgggattataggtatatgttattatgtttggttaatttttgtatttttagtagagacggagttttattaggttggttaggttggttttgaatatttgattttaggtgattcgtttatttcggttttttaaagtgttgggattataggtgcgagttatcgcgtttggtttagaggtgtatattttttaatagaattatttaaaaggaggttgtggggattatgatatttttatgttatagtattaattttttaagaataaggatatatttttatatattatgatattttgtttatatttaaaaaaatttatatttattttagaatattatttaatttttagttcgtgtttatatgtttttaattgtttttaaaatattttttatagatttttttaaaattttgtttaaatgttatatttaatcgatatggtaattaaatgtaaatttatattgtatttggttatgttttttagtttttttgtataaggggggtttttttttaggatgtaaaatttttattatttttttttttttatttggggatttgggttgaaaattaggagtggttggaatacgtttatttattgtttggttttgtaggttgttggagggtattatagaagaatatttttttggagaggggtcgtgagtttggttggtttagattgagtgttttggtagagtttttttttatgtgtgtagtgggaaagaagtttagattagtttaaaggtttaatttttatttttagattttattttattttttagagaaataggttttttattttgaattttaaagatagttgtatttttatttttagggatttagtattttttttggtttatttttaaagagttattttgggttttaggtagtaggtggagttgagggataatggtttaaggttaagagttgatttttttaattttgtttagtgatttagtttttatattaggtgattaggataattaggttaatttgatagggggcggtgtttataaaaaggttatttatttagagttagaagttttatattagttattataattttgttaattttaagtatttgtttttataggtattttttttgggattaatttataatttttgggatttttaattatagaatttggaagttagtggggatagaaagacggggagtttgggttaggtgtaggggttttgagtttcgggttttgttatttagtttttgatttttgtttttcgattttaaatgagtagtttggattaagttatttttaaggagagcgatggggagggttttttttttagtataagggtagttttggttttggttgaagtttaattttaatttttaagattgtgagaggatggggatttatttttggaggaggtgttttttttggtattgataaagaatgttttggggagggggtattataggttatttgaattagttttgggattttggttattttagtgttattgggtagggggaatttttggttttttgggtatatggaaggtattagtagaaagttagtattggtagggattttttggtataatatttagtatgtatgttgtgttaggggttgataagggtgttgtttttggtttttttattttggagtggttatttgtttttattttagttttagaagtggaaattgagatgatgtgtggaggagagagttagcgtttatgttgggaattttgaggtttttttttagtttttagattttgtgatgtttaaagggtgagttttgtgggtttaggacgtatggtagatggagtttagtttttttggtatttagttgggagttaagtatagaatacgtattagtgtttattaaatgattgaggaaatgaatgaatgaatgtttttattttaatttttagtttggtttttttttttttttttgtagttggtatagatggtattgttttagtttgtttttttttcggttatagagttttttttggtttttgttattttttgtttggtattttgggtgtttaagggtttgaggtttcgggtttttaaaggtttgaaaagtttattagagttatggggttggtttttgttcgggtatgtgttgattttggggaagaattcgtatttggtattgttaaggatgagttagcgttacggggacgttttgtagattcgtattggttttacgttcgtgttggtgttgagtcgtttggatattattcggtaggttttggtgcggtagggcgacgattttaagggtcggtttgatttttatatttttatttttattattgatggttagagtttgatttttagtatagattttggatcggtgtgggttgttcgtcggcgtttggtttagaatgtttttaatattttttttatcgtttttgatttagtttttttatttttttgttatttggaggagtatgtgagtaaggaggttaaggttttgattagtaggttgtaggagttgatggtagggtttgggtatttcgatttttataattaggtggtggtgttagtggttaacgttattggtgttatgtgtttcggatagtatttttttgagagtagcgatgagatgtttagtttcgtgaagaatatttatgagttcgtggagattgtttttttcgggaattttttggattttttttttatttttcgttatttgtttaattttgttttgtagaggtttaaggtttttaattagaggtttttgtggtttttgtagaaaatagtttaggagtattattaggattttgataaggtgagttcggggtgtaggtggtaaggggtattttgtagggtttgggtgtagttttttttttttagttttagtatgtttatatagttgttgtgttgttaaggtttaggaaggttttggatattttagattagttgtgtgatttggagtcgatttttttttttttttgggttttagtttttttatttttgaagttttttttttagggttttttaaagtttttaagaaaaaagttttggaaatggggttttagtagagttttgtaatgtggggggtttatgagtgagaaagtttttattttgtagaaatttaaattttaatagaggttaatttttagttttggtgttacgttgtttttttgtgtttatattaattttttttttttttgaaattggatttttggtgttattgggaggaagggttaatggggtataaaatgatattttaagttatatttagggttgttattagtttttgttgtaagttgtaattttttgtttagagattaagttgggaggataggggggtatttagttattaggtataggttaggggagtggagtaacgtttagtttttgattttggaagtgttagaggtgtttttaagtttgtgtttttttaga

SEQ ID NO: 26 - DNA, 6359 bp, Artificial Sequence
  chemically treated genomic DNA (Homo sapiens)
tttgagggggtataagtttaggggtatttttggtatttttaaggttaaaggttgaacgttgttttatttttttggtttgtatttggtggttgggtatttttttatttttttaatttggtttttaggtagggggttgtagtttgtagtaggagttggtagtagttttgggtatggtttaaagtgttattttatgttttattgatttttttttttaataatattaggggtttaattttaaagaaggaaaaggttagtgtgaatatagggaagtaacgtgatattagagttggggattagtttttgttggggtttaggtttttgtagaatgaaagtttttttatttataggttttttatattgtaggattttgttagggttttatttttagggttttttttttgggggttttgaggagttttgagaagggggttttaaggatgaggaaattgaggtttagagaaggggaagagtcggttttaggttatatagttggtttgaggtgtttagagtttttttaggttttggtaatatagtagttgtgtgggtatgttggagttgggagggaggggttgtatttaggttttgtaaggtgttttttgttatttgtatttcgggtttattttgttaaagttttgatagtgtttttggattgttttttgtaggaattataggaatttttggttgaaggttttgaatttttgtagggtagggttaggtaggtagcgaaggatggggaagaagtttagggggttttcggaggaggtagtttttacgaatttatgagtgttttttacgaggttgagtattttatcgttatttttagggaagtgttgttcgaagtatatggtattaatgacgttggttattgatattattatttgattgtaagggtcgaagtgtttaggttttgttattagtttttgtaatttgttgattagggttttagtttttttgtttatatgtttttttaggtagtaggaggatgaggaagttgggttagaggcgatggagaaggtgttgagggtattttgggttaggcgtcggcgggtagtttatatcggtttagagtttgtgttgaaggttaagttttggttattagtgatgagggtggaggtgtagaggttaggtcggtttttgaaatcgtcgttttgtcgtattagggtttgtcggatggtgtttaggcggtttagtattagtacgggcgtggagttaatgcggatttgtaggacgttttcgtagcgttggtttatttttgatagtgttaggtgcgggtttttttttagggttagtatatgttcgagtaagggttagttttatggttttggtggattttttaggtttttggggattcgaggttttaaatttttgagtatttagaatattaggtagaagatggtagaggttaggagaagttttgtggtcgagaagggaatagattgggataatgttatttgtattaattgtagggaaaaaaggagggattaggttgagggttgagatggagatatttatttatttatttttttagttatttgataaatattgatgcgtgttttgtgtttggtttttagttggatattagaaagattaagttttatttattatgcgttttgggtttatagagtttattttttgagtattatagaatttgagagttggaaaggagttttaagatttttaatatgaacgttggtttttttttttatatattattttagtttttatttttggggttggagtagaggtaagtgattattttaaaatggggaagttaaggatagtatttttgttagtttttggtatagtatgtatgttgggtattgtattaaagagtttttgttagtgttggttttttgttgatattttttatatatttaagggattaggagttttttttatttagtgatattgaggtggttaaggttttagggttggtttaaatagtttgtgatgttttttttttagggtattttttattaatattaggaggggtattttttttagggatgagtttttatttttttatagttttggaggttggggttgggttttagttagggttagggttgtttttgtgttaagggggaagttttttttatcgttttttttaaaaatggtttagtttaaattgtttatttaaaatcgggaaatagaagttaagagttgggtagtaaagttcggaatttaggatttttatatttagtttaggtttttcgtttttttgtttttattagtttttaggttttatagttggggattttagagattgtaaattggttttaagaaaggtatttgtagaggtaggtgtttgagattggtagggttgtaatggttggtgtggagtttttggttttaggtgagtggtttttttataaatatcgttttttattagattggtttggttgttttgattatttgatatgaaagttggattattgaataaagttggaaggattaatttttggttttgggttattattttttagttttatttattatttaagatttagggtgattttttggggataggttagaaggggtgttgggtttttggggatgaaggtatagttgtttttagggtttagggtagggagtttatttttttgaagagtagggtagggtttgggagtgggggttaggtttttggattgatttgggttttttttttattgtatatatgaggaagagttttgttagggtatttagtttaggttaattaggtttacggtttttttttagagggatgtttttttgtagtattttttaataatttgtaaaattaaatagtaaatgggcgtgttttagttatttttgatttttagtttaagtttttaagtggaaaagaagagatgataaagattttgtattttaaagagaggttttttttatgtaaaaagattaagagatataattaaatgtaatatggatttgtatttgattgttatatcgattggatatggtatttaaataaaattttaaaaaaatttataaaagatgttttggggataattggggatatgtaagtacggattggagattagatgatattttggaataaatgtaaatttttttaggtgtgaatagagtgttatggtatgtgggagtgtatttttatttttaggagattaatgttgtagtatggaagtgttatgatttttataatttttttttgaatggttttgttaaaaaatgtatatttttaggttaggcgcgatggttcgtatttgtaattttagtattttgagaggtcgagatgggcggattatttgagattaggtgtttaagattagtttggttaatttggtgaaatttcgtttttattaaaaatataaaaattagttaggtatggtggtatgtgtttgtgattttagttattcgggaggttgaggtaggagaatggtttgaatttgggaggtggaggttgtagtgagttaagatcgtgttattttattttagtttgggcgatagagtgagatttcgttttaaaaaaaaaaaaaatgtatatttttaaagagtgtaattggattgtttgtaatttaaaggtttatttttgtttgaggggatggatattttattttttatgaatgtttattttatattgtatgtttgtattaaaatattttatgtattttatatatatatatatttattatgtatttataaaattaaaataatgtatatttatttattaataaatcgagagaaagtagatatgagaaatgttagatatttatggatttacgtgaggatatatggtgtttgttgtattaaaggagtttttaatatggatttagattttagttagatttaagaggaggaggaggataagttttaaattggatgtgaaaaggaagtttgttattttttttttttttttttagatatagagttttgttttgttatttaggttggggtttatgtgttataattatggtttattgtagtttcgattttttgagtttaaataatttttttgttttagttttttgagtagttgggattataattataggtgtgtgtattatgtttggttaatttttttatttttaaatatttttttgtagagaggaggttttgttatgttgtttaggttggttttgaatttttgggtttaagtaatttttttgttttggttttttaaattgttgggattataggtgtgagttattgtgttcggtatggatgtgagagggaagttttgatttagattggagtgggtttttatttttgaaaatgagaaaattgtgggattaatttgtgaagatgttaaggtagatggatggggaatttaatagagaaatagagtatgtttgaaggttatgaatgggagaagaggaaagttgttttttgtttatatttttattgggtttagatgatttaatgaaaaaggttaaggtttgaggttaggttcggttttatagaaaatggattttttttttttttttgtttgtttgtttttttaattaattaaagtttatggtttatttagatttttttgcgttttatttaatgttttttttttgttttaggatttattggatattatatgatatttagttattacgtttttttggattttttttggttgtgatagttttttaggatatttttgtttttgatgattttgataatttttaggagtattggttggatattttgtaggatgtttattattggaatgtgtttgatgtttttttttttatggtaagtttggggttatggtttgttggtgggaagattttggaggttaggtgttattttcgttatattatattagggttatattttattaatgtgatttatagatgtggatgttgattttgattatttggttaaggtagtgcgtgttaggtttttttattgtaaagttattttttttttatttttttatattgtattttttggaaggaagttattatgtatagtttatatcgaaggagtgggggattacgttttttttttttgaggggggattatttttataaattatttgaaatttttttgtatgatagattatttatttttttatttttaatgtttttttaaaatttaaaaaaattaaattataggatataatatagaaaagtgtatatgttagttgggatcggtgatttatatttgtaattttagtattttgggaggtcgaggtgggaggattatttgagtgaggttaggagtttaagattagtttggttaatatagtgaaattttatttttattaaaaatataaaaaaaaattagttgggcgtgatggtgtatatttgtaattttagttattcgggaagttggggtatgataattgtttgaattcgagaggcggaggttgcggtgagttaagatcgtattattgtattttagtttgggtgatagagtaagattttgttttaaaaataaataaataaatggaaaagtgtatatgttatgtatagttcgattatgtgtagtttgatgaatttttgtaaatttaataaatatatatataattagttttaattaagagatattataagtatttaagaagtttcgttgtgttttttttttaagggtatttatgattttaatatttattgtatggatttgttttgtttgttgtattttatataaatgagattatgttatatgtatattttttggaggggagttaaggaattttaaaaagttaatagatttttttagagtagtttttggtttatagaaaaattgagtggaaagtatgatgagggaggtaaaagtggttatttattatttttattttgtagttttttttattattaatattttgtagtggtgtaatatatttgttataattcgtggatgaatattgatatattttggttgttgttgttgttgttttgagatagagttttaggtttggtgtggaggtttatatttgtaattttagtattttgggaggttgatgtgggcggattatttgaggttaggagttttggattagtttggttaatatgataaaattttatttttattaaaaatataaaaaaattagtcgattatggtggcgtatgtttgtagttttagttatttaggaggttgaggtaggagaattttttgaattttagaggtggaggttgtagtgagttaagatcgcgttattgtattttagtttgcgttatagagtaagattcgttttaaaaaaaataataaaataaaataaagagagataaagttttggatttttttttttttttttttttttttttttttttttttttttttttttttttttttttttttttttttttttttttttttttttttttttttgatggagtttcgttttgttatttagtttggagtgtagtggtataatttttgtttatcgtagttttcgtttttta

SEQ ID NO: 27 - DNA, 5300 bp, Artificial Sequence
  chemically treated genomic DNA (Homo sapiens)
gggagttttgaggaaggaagtttcgaaggagggaacgtaagaaatgattaggttagaattaagggtggtttagaagttaatttttagtttagggatagttttatagagaatacgtttatgatgtaagattttgttgagggtttggagtagtgaagattggggtaaggttattttttgggaagtgaagttattagagattttgcggagtagttttgagagttttttgagtaggaaggtaatagaatgtgaaggatattggagagaaggttaataggaagtaaataaaaataggttaaggaaatttagtatagggggttgtagggtttagggagtgggttttttattttttttttttacgtttggttaggtttttatttttcgggagtgcgtgggttttgaggttgtgtaggaagtgtcggtggggttggtgtagtcggttagcgtaattttgtacgattattataatttcggtgagtattgtaggatattttgaaatttaggagaattttggtataggtgtttttttatgggataatggatatcggggtagtgagggggtagagagttttggggttttttgggattgaggaggtagaatggaggggtttgtgttttaatttttttttgttttttagagcgtagatgttttgtgttttacggggtattaagtaagagtagatttttggttattttgtgttttgttgaagtttgttagtgtgttgagggtgagattgagggtttggggcggggtagtggaggcgggatggtcggggttttttttatattgtttgatgggttttttaattttagggaagtgttttcgttagcgtcgcgttttggagcggggtttgtaggacgaggatggttataggatgaagtttgtttgttattattttcgtgtggagtacggttagtttttttatcgaggttttggtttgattttttttcggggatcggttgttttggtttttttgggtgtagtttgttttttttataggttatgtacgtagtttgtttgttttgatattaattttttatttttttagttttaaagtaatttattttttttttttttttttatttttttttaggtttttaggttaaggtttttcgagaagatagtagagttgtttttcgtttttttgagattaagattatttaagttttgtattttagtatgaagtaaatcggagaggcgggtagggttggggggagatagggaggttgaggtgtggtcgaggatttgattatttggaagtgtgaaaatttttttgggttgttagaagttttgggtttggttataaatagggaggtagtggtatttttttatgggggtggcgaaggtggaatgagaggatttatatagagtttttagtttgggtttattttgtattttttttttttttttgattatttttgcgtacgttattttcgtagttaaggatgttaaggtcgttgttaattagatgcgtaattttttggttcgagttttttgtcgttttcgtttggaatttgggaaagaatatttgattatgggtttggatggggttatttatgatttcgagggatagtgagttatttggtttttttagttttttgttttttttatgtttcgttatttaggttttgttttttagaagttagatgtttgtgtttttcgtttttatttgttattttttcgagttttgttgattgtttttttgttttttgtagtttttagtatttgttggattcgaatagttggatcgaggagatgttttttgaacgtttgtgtcggagtattcgttagcgggtagtttgtgtttagtttaacgattttttttaggagtatggtatttaggggtgttaggtgtgagggttgtttttttattttcgttgggaggaatttgaatttgggaattatgaagttggaagtattgttgtgttcgtttttatgaatatagtttgggattagggtatattaaaggtttttggtagtaaagtgttagtgttggtagcgaagtgttagtgtgtgttgttagggttgagagtagtgtttttgttcgatgtagttttgggtaggttaggttgatataattttagattttttgagttttgatgatttttgggttgtttagttttgttagaattttttagatgattcgttaggagtttagtgttttataggattatttcgagtagaattgggatttaagagtttgtattttaaggattagagtttatgttaagattattttttagtttttaaggttttttattgttcggttgtcgttagttattacggttttagatagggtttgtgtttagttgatatttgtgatatagtttttttgttttatgagttgttgtttagttatattttttcgattttgttttcgtgttgttggcggttttgaggtttgtagattttagttgagtttcgggttgttgaaagtttgttgacgtttggttttgttattagtggaatgaggtgattttttcggagttgtgtaatttttaggttcggtagtgtttttttttagttattggttttaaataagttaaaagtttgattttggtgtgtttgtgaattttttgaggaagtcgttgtttttttggggttttttttttttatcggatttgtttaatttttttttatttagtggtatatttggggtttttagagatgatttcgcgtttgtttaaagaagtttggtgagattagttttcgtagaggttatgatagtttagtagtttgttatttagttattcgatagaaattcgggaattttttattttatgttatgttttgtgttaggtgttagagatatagttgtttattttagggtttatcgttggggagatagataagaggacgggtagtttttattttttgtgaaagatgtgatgttagggagtagtgtggttttgtggggtatttaattaagttaggggtattgttaggtagggatagggaaggttttttggagtaggtggtttttaagtggggttttgaagattgagaaggagttaggtaaagagtaggggtagatgagggtatttggggtagaaggagaatatataaaggtttagaggtcgggggtaggatagggtatttttggggatattgtatgtaattgattatattcggagtttggatttggaagtggtggaagagatggagatggtgagataagtagtaagtacgttagttttttaggtgcgttttttttcgatgagtattgttttattttacgtaattttgagaagtttgggttttttttattgtggtagaggttttttgaggtttttgtatatatggttttatggttgtttattagattttttttttagtagttgtttagtatggtggtggtataagtttatttttcggagttagggatttagttgtagtaagatatggttcggtttgggaggttaattatgaagaaggtagtagttgttattgtttaattttagaaattttaattttgtttttttttttttagttttgattatggatttagtagtagcgaattcgttaatgtagtgggtggtatagttagggttttgattttggttttgtagtagtatagtttggaaaagttttgaggggagagagatttttattggttcgagggtttggtatagagttagaaatgggggggaaggtatggggttgggtcgtttttgattttttaggtattatttaggaggttttggttttttattgaattttgttatttttttttggtatggtttttttttaaatttttaaattgtttttttatttataaaagtggtttttgagtgttagtttagtgggatttttattttttatggttttagttttttaaatagggttggatttttgattttgatttagttgtggttatttagtttttttttggggattttggattttgaggggggtatgtttagttgtgttgggaatttatattttttttggttggagtagaatttgtggattgtagttttgagggtagttatgttttgtttgtgtttggaaatataagaaatttgattgtagagagaagaaagaggagagaggaatagagcgaggaaatcgttcgttttcggggttttttttgttttttatttttgattttttaagattagtggggtttttttttttgttttttttttttgagttttgtgaaattttttaatttttattttttattttaaattagtttaaggtgggttgttttttttttaattaaagaaaggtgtttttggtggttaaaggtatatattcgatagttagatttttaggttggaattttgttttttataatatgcgaataatattcgtgttgtatatagagtatggttgtgaagagttgagtgagtgtttataaagtatttagagtagtgtttggtatatgttattatttcgtagcgggaaattatttttttttttgttttttgggtatttttgtgagtgaagggaggtattaataataattatattgggatatttgtatatattggaatgttttaggtaaattaggtttaaattgtattattttatttgtagtttaaattaataaataatttatataaattatattttgttttttaggcgatttaggaaggtttattaggtagggattgttattttttttttgagataaatattatgttagtaaattggtttacggtggggtggtagagggagagggtttaggtgggggcggatattattgtttgtatagttgatgtggaattagaaagttgattttggatgtaggaaaaaggttagggttgtattttttttttttgttttttgatgggtgattaatttttttgaaatacggacgttttaaggttaatgagattggtgttattttagaaaagggttattttgtgggcgggtcggtgggagggtatttgaaggtggggttaagggaggttttaaaatagtttatatagtaggagggatggttggggtttttgagttataagtggtattttagggttttgacgggcgtttcgttatgttgtttttgggtttgttgttgttgttgtttttgttggttggcgttcgtttgttgtggaattggtggaagtttcggagtttttatttttcgttttttgtttcgggttttttgtatttgttgtagttcgattttttaatttatttgtttggtttgatttagaaattcgggtttatttataggttttattttgggttgtaaggtgagaggttgatttcgttttggtttttattataggagggggcggaggtgacggagagggtttttttttcgttgacgttgttttggttgttttttaga

SEQ ID NO: 28 - DNA, 5300 bp, Artificial Sequence
  chemically treated genomic DNA (Homo sapiens)
tttgggagatagttaaagtagcgttagcggagagaggatttttttcgttattttcgtttttttttatggtgagggttagagcgagattagttttttattttgtagtttaaggtggagtttgtagatgggttcgaatttttgagttaggttaagtagatagattgggaggtcgggttgtagtaagtgtaagaagttcggggtaagaggcgggaggtggaggtttcggagtttttattagttttatagtaggcgggcgttagttagtaggggtagtagtagtagtaggtttaggagtagtatggcgagacgttcgttagggttttgaggtgttatttatagtttaagagttttagttattttttttgttgtgtagattgttttggggttttttttgattttatttttaggtatttttttatcgattcgtttatagagtggtttttttttggaatgatattagttttattggttttgggacgttcgtattttaaaaaaattgattatttattaagaagtaaggaagggaaatgtaattttgattttttttttgtatttagagttagttttttggttttatattaattgtgtaggtaatagtgttcgtttttatttgggttttttttttttgttattttatcgtgggttagtttattggtatgatgtttgttttagagagaaaatggtagtttttgtttaataggtttttttgaatcgtttgaagaataaaatgtgatttgtgtgggttgtttgttagtttaagttatagatagagtaatatagtttaagtttggtttgtttggggtattttagtatatataggtattttagtgtgattgttattagtgtttttttttatttataaaagtgtttagaagataaaggaggaagtggtttttcgttgcggagtaatagtatgtattagatattgttttaagtgttttgtgggtatttatttaattttttatagttatgttttatatgtaatacgggtattgttcgtatgttgtggagggtaggattttagtttggaaatttagttgtcgaatatgtatttttagttattaggagtatttttttttggttgaaaggaaaatagtttattttgagttggtttgagataaaaaataagaattggggaattttatagaatttaggaaaaagaagtagaggaggggattttattggttttagaaagttaaggatagggaatagaaaaagtttcggagacgggcggttttttcgttttgtttttttttttttttttttttttttgtagttaagttttttgtgtttttaggtataggtagaatatgattgtttttaggattatagtttataggttttattttagttagggaaagtatggatttttagtataattgggtatgttttttttaaagtttaaagtttttaggaaggggttggatagttatagttggattaggattaagggtttagttttatttggggaattgaagttataaggggtgggggttttattggattgatatttagagattatttttgtgggtaaggaggtagtttggggatttgggaagaggttatgttaaagaggagtggtagggtttagtgagaggttagggttttttggatggtatttgagaggttagaggcgatttagttttatatttttttttttatttttggttttgtgttagattttcggattagtgggggtttttttttttttagagtttttttagattgtgttattgtagagttagagttaagattttggttgtgttatttattatattggcgagttcgttgttgttgaatttatgattaggattgagagggagaaaataggattgggatttttggggttgggtaatgatagttattgttttttttatggttgattttttagatcgggttatgttttgttgtaattgaatttttggtttcggaaaatgggtttatgttattattatgttgagtagttattgggagaaagatttgatgagtaattatagggttatgtatgtaagagttttaggaaatttttgttatagtgggaaaggtttaaattttttaaagttacgtgggataagatagtgtttatcggaaaggagcgtatttggaaggttgacgtgtttattatttgttttattatttttattttttttattatttttaaatttaaatttcgaatgtggttaattatatgtaatgtttttaaaggtattttgttttgttttcggtttttgggtttttgtatattttttttttgttttagatgtttttatttatttttgttttttgtttggtttttttttagtttttagagttttatttggaggttatttgttttaggaagttttttttgtttttgtttggtaatgtttttgatttggttagatgttttataggattatattgttttttgatattatattttttatagagggtggggattgttcgtttttttatttgtttttttagcgatgagttttggagtgagtagttgtatttttggtatttggtatagggtatggtatgaagtgaaagattttcgaatttttgtcgaatgattggatggtaggttgttgaattgttatgatttttacggaaattgattttattaaatttttttggatagacgcggagttatttttgaagattttaggtgtgttattaaatgggggaaagttaggtaggttcggtgggaaggggagattttaggagaatagcggtttttttagaggatttataaatatattaaagttagatttttggtttgtttgaaattagtaattggaagaagatattgtcggatttgaggattgtataatttcgggaaagttattttattttattgataatagaattaagcgttagtaggtttttaatagttcggaatttagttaaaatttgtagattttagaatcgttagtagtacgaggatagagtcggggaggtgtagttggataatagtttatgaggtagaagagttgtgttataggtgttagttgagtataagttttgtttgaggtcgtggtgattggcgatagtcgggtagtggagggttttggaagttgaagggtggttttggtatggattttggtttttggggtgtaggtttttgggttttagttttgttcggggtggttttgtgaagtattagatttttagcgggttatttgggaggttttagtagagttgaatagtttaagggttattagggtttagagagtttaaggttatgttaatttggtttgtttagaattgtatcgggtaggggtattgtttttagttttagtaatatatattgatatttcgttgttaatattgatattttgttgttaaaagtttttaatatgttttggttttaggttgtgtttatgaaagcggatatagtagtgtttttagttttatggtttttaggtttaggttttttttagcggaggtgggagggtagtttttatatttggtatttttgagtgttatatttttggaggaagtcgttgagttgggtataggttgttcgttggcgggtgtttcggtataggcgtttagagggtattttttcgatttagttattcgagtttagtaggtattgggggttgtagggggtaaaggggtagttagtagggttcgggaggatggtaggtggaaacggagagtataggtatttggtttttgaggggtaaggtttaggtggcgaggtatggggaggataagagattgaggggattagatgatttattgtttttcgaggttataggtggttttatttagatttatgattaaatatttttttttaggttttaagcgaaggcggtaggaggttcgaattaggaagttgcgtatttgattagtagcggttttgatatttttggttgcggggatgacgtgcgtaaaagtggttagaggggaagagaaggtgtagggtgagtttaggttggggattttgtgtagatttttttattttattttcgttatttttatggagaggtgttattgtttttttatttatggttaagtttaaggtttttgatagtttaaggggatttttatatttttagatggttaggttttcggttatattttagtttttttgtttttttttagttttgttcgttttttcggtttgttttatattgaagtgtaggatttgggtgattttggttttaaagaggcggaaagtagttttgttgttttttcggagaattttaatttggaagtttaagagggggtgaggagaagggggaaaggtgagttattttgaggttgagagggtaggaagttggtgttagagtaaataggttgcgtgtatgatttgtaagaggagtaggttatatttagagagattaaaatagtcggttttcgagggagggttaggttagggtttcggtgggaagattgatcgtattttatacgggggtagtagtaggtaaattttattttgtagttattttcgttttgtagatttcgttttagggcgcgacgttggcgagggtatttttttgaagttggggaatttattagatagtgtggggggggtttcggttatttcgtttttattgtttcgttttaggtttttagttttatttttagtatattggtagattttagtagaatataaggtggttaagagtttgtttttatttggtgtttcgtaaaatatagaatatttgcgttttggagaatagagaggagttagggtataggtttttttattttgtttttttagttttagggagttttagggttttttgtttttttattatttcggtgtttattgttttataggagggtatttatgttaaagtttttttgaattttagggtgttttgtagtgtttatcggggttgtagtagtcgtatagggttgcgttggtcggttgtattagttttatcggtattttttgtatagttttaaagtttacgtattttcgggaggtggggatttggttaagcgtggggaggagagatgagggatttattttttgggttttgtagttttttgtattgggtttttttggtttgtttttgtttgttttttattggttttttttttagtgttttttatattttgttatttttttatttagagaatttttaaagttgtttcgtaaggtttttggtgattttattttttagagggtgattttgttttagtttttattgttttaggtttttagtagagttttgtattatggacgtgttttttgtgaaattgtttttaagttaagggttagtttttggattatttttggttttgatttggttattttttacgttttttttttcggaatttttttttttagagttttt

SEQ ID NO: 29 - DNA, 6275 bp, Artificial Sequence
  chemically treated genomic DNA (Homo sapiens)
ttagtgttataaataaatttttagtggtgttaaagaaatagtatttaaatataaatttaatttttttagtaaggtaattttatttttatagaagggtgcgatttgtggatggagtaatggtaagagatatttgaataaaggaggggaaggggtttttatttttgatgtaggtagtttttattgttgtgttatttttttattggttagggttggattgtatagtttaagttaatttcgattggttattttaaagagagtagggatataagttagagtggcggggtgagtagtttggtgggaataggtgatttaagatgatttaggttagagtaggtgattaggagtgatttaggacggagtaggtgatagaggttaggaggtggttgtttattggaattaggggtaaggagacgaaaattttaaaatgaagagttgaatataattgatatattgattttttggagaggattttagaatttattgtatttaataatttataggttaaaatttttgaagaggaatttattatattttatattaggaagtagaagttgtagtgattcgagatcgtgttattgtattttatttgttagggaaatattttaagtatgaggttatgaaagttaaggtttttagttgttgtttttgggtaatatgggagaggtgaaatttaacgtttgttttttttcgtagtgatttttttttgaaaatgttttagttttttggtaaaggaacgtgtattgtttggtgtgtgggttttgtgaattttgaggaggtggagtggtaggagatgggggttttttttttttttatttttttttggtgtttagggaagatgttcgtttattttgggaggattgagattcggagttttaggtaaaattggtgggttaggggaggttttaaatgttggtgagattttgattttggttagtatttaggtttttgatattattgtaagaaggaatttaaggatgagttagaaaatagtgaaaatatggagatttattgtagtgaaaagtatatattaaagaaaggggagtgtgggtcggtttaagagaggtagttgtattaagagatagttgtattatagggtttagagttattatttttatgggtttttttaattaaggggtgaatatttatgaagatttttggaaaaaggtaaagattttttggaattatggtattatttttttttttttttttttttttttttttttttttttttttttggggaaagagtttttttttgtagtttaaaaaaaaatttttgttttttagttcgggttaaagaaatttttttgttttagttttttgagtagttggaattataggtacgtgttattatgtttagttaatttttgtatttttagtagagatggggttttattatgttggttaggttggttttgaatttttgatttggtgattcgtttatttcggttttttaaagtgttgggattataagtgtgagttattgtgtttagttggtgttatttatgtttgtattaaatatgggtgtttttagaattgttatagcgttggtgggtgtgtaatttaatatgttaatgagtgtataatgaggttttaggtgaaatttaggttaaatttagtgttgtgttggtttttattagttttagttagtttggtttatattttgattttcggggtttttttggtttttgtagttattttaatagtttttttttgttagttgtgtgaagttgttgtttggaattgtttatttttttgtaattatcgtgtattatttttgtttaatttgattgttcgtagagatttttattttttatttttaagggttgatgagggagggaggaggttagtgttttatatttattttttgttgattagggttattggttatgtttagttagggtatggaaatttttagttgtttgttttaagggttttaagggtgggttattaggagagtttgaattcgaggtagggattggttggaatttttgtatgattattattttgatatggaattgttataatttagaagatataaattttataaggaggttaaataagtaaggattaaagattagtagaaattagagttattaaaggttttaggaaaggtaggaattgtgttatatttagtaggtatttttttgatgaggttttagatggtttgagtagtgtgtttattgaaattatgtagttaggtagtatgttggtaaatttttttgtttgtttgtttgagacggagttttgttttgttatttaggttggagtgtagtggcgtgatttcggtttattgtaagtttcgttttttaggtttacgttatttttttgttttagtttttcgagtagttgggattataggcgttcgttattacgttcggttaattttttgtatttttaatagagatagggttttatcgtgttagttaggatggtttcgatttttcgatttcgtgattcgtttttttcggttttttaaagtgttgggattataggtttgagtattatgttcggtcgcgtgttggtaaattttttgagttggtagtttaattaattttgagttgttaatataaagaataggtgtggtttattattgtgtaaatttttttgtttagttagaagataaagttttttgttttttgattatttgaatggtttatgttttggttttgttagcgttatataatggtttagtaattttgtaaaattttgttatatttaggaaagtttttaggttttttttttgttgttgttgttgtttatagaggttttatttttaagtaaatttttgtttgatggataaggtttagttttttgagtttagaatatattataggtattttatttttggtagagaaatttgggtttggatggagagaattgattttttttaaggaagtttaggatttgaatggtatttttatttgagttttttttagtggggttgtatataaagatgttatttatatattggagtgtggtttttttttttagttttggtttttttaatttttgtgttaaggtatttttgaataagtaagggttatttttaaagttatgaggtagtattgttttggtgtattattgggtaatagtagttttaggattagtttatttgaaaggaaataagttttgagagtcgaagtgtaaaggaatataaaagaaagtatttttatgatttaatattgtgaattaattggtgttttttggtatttggttaagtatagtataaggatttggtattataggatgtaagagaattatgatttcgttaatggtttttaagttttgaattagattatatatatatatatatatatataattttttttttttgagatggagttttattttgttgtttaggttggagtgtatggtataattttagtttattgtaattttcgtttttcgggtttaagcgatttttttgttttagtttttttaagtagttgggattacgtgtgttattacgtttttaaagtatggttttttgttttttttgtttaaaaattaaatgaaaaatatggtttaggttgggtgttgtggtttatatttgtaattttagtattttgggaggtcgaggtaggtagattatttgaggttaggagtttgagattagtttggttaatatggtaaaattttatttttattaaaaatataaaaattagtcgggcgtggtggcgggtatttttaattttagttattttggaggttgagatcggagaattgtttgaatcgggaggcggaggttgtagcgagttaggattgtattattgtattttagtttggacgatagggtgagattttggggagtggggaggagagaattaataaattatatgatataaaggaataaaaatatataagataggataagagagaggaaggatatagggagagttaatatatatatagtagtttgaagtttcgggaaaggagaaaaaaatggggaggagtaatatttgaatagataatatttgagaaattttttagattgattaaagatatttagttatagagttaagaaattaggagttttagaataaataagtagaaagttatatttagtaatttagttgttagtttaattgaatttaatatgtttttttttttttggttgtttgtaaattattaattttttaaatgttgttagaattagttgtattattttgttgggttttttatttttggtttgaatgtgatttttgattttgtatttattttatatttgcgtgagttatgtttttaaattttttgataattatattttgaatatatatgaaatataggatttataagataatattttttttttttttttgttgtacgtttttcgtattatgttattttttttattttattaaaaataattttggttattatttacgaaatttggttttaatttgtagtttgaaatattttgttttggtagacgcggtagggaggtgcgtggagggagaattgaattaaaaaaaaaaataataaaatacgaatatttagatttttttgtttagcggtttttttttagggattagatgattggtttttttcgtttcgaattgatttcgggattaattcggaaggttattgggagaagtcgagggtagtttagttacggtcggttttcgttttttttaggacgcgagggtcgttttgggtggggaattcgcgatcgggcgaggatttatttcggtgtggggtttttcgatttcgaaagaatttcgttgtattttcgtttagagtttagattaagcgaaaagttatttgagaggtttcgggggcgcggggtgaggagtcgtggcggaggttttggtcggggcgtcgtggatattttcgagttatcgcgttttttttttgtagttttcgcgtcgttgggaggagcgagggagcgagcgggaaggggtttagttggtttttgttcggttttttttagcgttcggttttgaattcgttttgtattgttgtttgggcgggttcggggatttagtattcgatttaaaggtgtaggcgcgcgagtataatttatggttgcgttgggttgcgcgaggttgaggtgggcgttgcgaggggtcggtcgtggtttttcgtatacggggttagagttaaggtcgcgatttttgtcgtttttttttcggataaggttatcggagttttcggagtcgggtttggtgttcggcggcggtaacggagtttagaggagattttacgtttaggatagttgcgtttttttttttagttgttcgtttaaggttatgttttgtaattgtattagttataggtaattcgcgggggtatcgcgttttggggatgggagtgggtatcggaatagagaggttagaggtgagaagacgttggatagaaagtgaaggttgtaggaatttagttggggatttattgaggttatggttataaattggaaattagtagggagaatgggtaaagtgtagatagagttttttgagttgagataaataggacgaggaagggtttaaattaggacggtattagtaagggggggatttggacgtcggatttatagtgagtagaggttgaggagggagttgttttgggaagagagtggtagaggtaaatgtgtaagttaacggatattatggaattattaattttgggttgatattggttattatagattttttttaaacgaaataattttaggaggattatagaaattttttggttatttgtaaggtaaatttttttttaggggaaaatataatgttgtattttagatcgtggaagtaaatttatagatagtaaggaaaaggtattttttgttattaagaaattagtttgaggtcgggtgtagtggtttatatttgtaattttagtattttgggaggttgaggtgggtagattatttgaagttaggagtttgagattagtttggttaatatggtgaaattttatttttattaaaaatataaatattagtcgggtatggtggtatatgtttgtaattttagttattagggaggttgaggtaggagaatcgtttgaattagggaggtagaggttgtggtgagttaagattacgttattgtattttagtttgggtaataagagcgaaattttgttttaaaaaaaaaaaaaaaaagaaaaaaagaaaaaagaaattagtttgtagtttgtgtttaggttagtggtgttgggggagaaaattaatgtttaataagaaagttttatatagtagaatatagaaatgaggtagggatgaatagtttattgtttattgatagagatcggaaaatttaatattg

SEQ ID NO: 30 - DNA, 6275 bp, Artificial Sequence
  chemically treated genomic DNA (Homo sapiens)
tagtgttgggtttttcggtttttgttagtgagtagtgagttgtttatttttgttttatttttgtgttttgttgtataaaatttttttattagatattggtttttttttttaatattattaatttgaatatagattataggttgattttttttttttttttttttttttttttttttttttgagatagagtttcgtttttgttgtttagattggagtgtaatggcgtaattttggtttattataatttttatttttttggtttaagcgatttttttattttagtttttttagtagttgggattataggtatgtgttattatgttcggttaatgtttgtatttttagtagagatggggttttattatgttggttaggttggttttaaatttttgattttaggtaatttgtttattttagttttttaaggtgttgagattataggtgtgagttattgtattcggttttagattgattttttaataataaaaagtattttttttttattgtttgtgagtttgtttttacgatttgagatgtagtattgtgtttttttttaagaggaaatttattttgtaaataattaagaggtttttataatttttttgaagttatttcgtttggaagaagtttgtggtagttaatattagtttagaattagtgattttataatattcgttagtttatatatttgtttttgttattttttttttaagatagttttttttttaatttttgtttattgtaagttcggcgtttagattttttttttattggtgtcgttttgatttaagttttttttcgttttgtttattttagtttaaagggttttgtttgtattttgtttattttttttattgatttttagtttatgattatagttttagtgggtttttagttgagtttttgtagtttttattttttgtttaacgtttttttatttttagtttttttgtttcggtgtttatttttatttttaggacgcgatgttttcgcgggttatttgtaattggtgtagttgtagggtatagttttgaacgaatagttgaaagaagaagcgtagttgttttagacgtggaattttttttaagtttcgttgtcgtcgtcggatattaggttcggtttcgggagtttcggtggttttgttcgaggggagggcggtagggatcgcggttttggttttggtttcgtgtgcgagaggttacggtcggtttttcgtagcgtttattttagtttcgcgtagtttagcgtagttatgggttgtgttcgcgcgtttgtatttttgggtcgagtgttgagttttcggattcgtttagatagtagtgtagggcgggtttaaagtcgggcgttggggagggtcgagtaaaggttagttagattttttttcgttcgttttttcgttttttttagcgacgcgggagttgtaggagagggacgcggtgattcggggatatttacggcgtttcgattaaggttttcgttacgattttttatttcgcgttttcgaggttttttaaataatttttcgtttggtttgaattttgggcgggggtgtagcgagattttttcgaaatcgggaagttttatatcgggataggttttcgttcggtcgcgggttttttatttaaggcgattttcgcgttttggagggaacgggaatcggtcgtggttaagttgttttcggttttttttaatggtttttcggattgatttcggagttagttcggagcgaggggggttagttatttgatttttggaggggggtcgttgaataaagaaatttaaatattcgtgttttgttgtttttttttttaatttaattttttttttacgtatttttttgtcgcgtttgttaaggtaggatattttaaattgtaggttgagattagatttcgtagatgatggttagaattatttttaataaaatggaaagagtaatatagtacggaaaacgtatagtaagaagaaaaaaaaagtattgttttatgaattttatgttttatgtatatttaaagtatagttgttaaaaagtttaaaaatataatttacgtaagtataaaataaatatagggttaaagattatatttaagttaggaatgaaggatttagtaggatggtatagttggttttaatagtatttgaaaaattggtgatttataggtagttagagaagaaagggtatattaagtttaattaggttgatagttgagttgttaggtgtggttttttatttatttattttaggatttttagttttttgattttgtgattggatgtttttgattagtttggggagttttttagatattatttgtttaaatattgtttttttttattttttttttttttttcgggattttaaattgttatatgtatgttagttttttttgtatttttttttttttttattttgttttgtgtatttttgtttttttgtgttatatagtttgttaatttttttttttttattttttagagttttattttgtcgtttaggttggagtgtagtggtgtaattttggttcgttgtaattttcgtttttcggtttaagtaatttttcggttttagtttttagagtagttggaattagaggtgttcgttattacgttcggttaatttttgtatttttagtagagatagggttttgttatgttggttaggttggttttaaatttttgattttagatgatttatttatttcggttttttaaagtgttggaattataggtgtgagttatagtatttaatttagattatattttttatttggtttttggataggaaggataggaggttatgttttaaaaacgtggtggtatacgtgattttagttatttggggagattgaggtaggagaatcgtttgaattcgggaagcggagattgtagtgagttgagattgtgttatgtattttaatttggataatagagtgagattttattttaaaaaaaaaaaattatatatatatatatatatatatgatttagtttaagatttaggagttattaacgaggttataatttttttatattttatagtgttaaatttttatattatatttaattaaatattagaaaatattaattagtttatagtgttagattataagaatgtttttttttgtatttttttgtatttcgatttttagaatttatttttttttaagtagattaattttgaaattattattatttaatggtatattaggataatattgttttatgattttagggatagtttttgtttgtttaaaaatgttttgatataaaagttaagaaagttagagttaaaaaggagagttatattttagtatgtaaataatatttttgtatatagttttattaaagaagatttaaataaaaatgttatttaagttttaaatttttttaaaaaaaattagttttttttatttaagtttaaatttttttattaaaagtgaaatatttgtagtatattttaaatttaggaaattggattttgtttattaaataaaagtttatttagaagtaaaatttttataaataataataataataaaaaaaaaatttaagaatttttttgggtatagtaggattttgtagaattgttaagttattgtatgacgttaatagggttaaaatataagttatttaaatgattaaaaagtagaaggttttattttttagttaaataaaggggtttatatagtaataaattatatttgttttttatattaataatttaggattaattagattgttagtttaaaagatttattaatacgcggtcgggtatggtgtttaagtttgtaattttagtattttgggaggtcgaggagggcggattacgaggtcgggagatcgagattattttggttaatacggtgaaattttgtttttattaaaaatataaaaaattagtcgggcgtggtggcgggcgtttgtggttttagttattcgggaggttgaggtaggagaatggcgtgaatttgggaggcggaatttgtagtgagtcgagattacgttattgtattttagtttgggtgatagagtaagatttcgttttaaataaataaataaaaagatttattaatatgttatttggttatataattttaataagtatattgtttaaattatttgggattttattaaaaaaatatttattaagtgtgatatagtttttattttttttggaatttttaataattttaatttttattaatttttggtttttgtttgtttaatttttttataaagtttgtgttttttggattatggtagttttatgttaaaataatggttatataaaaattttaattaatttttgtttcggatttagatttttttaataatttatttttgggatttttaaaataggtagttaggaatttttatgttttaattagatatggttaatgattttaattaataaaaagtaaatataaaatattgatttttttttttttttattaatttttaaaaataaagaataaaaatttttgcgggtagttaaattaggtaggaataatatacggtggttgtagggaaataaataattttaggtagtagttttatataattagtaaaaggaaattgttaaaatagttgtaagggttaagaagatttcgaaaattaagatgtgggttaagttggttaagattgatgggaattaatatagtattggatttgatttaggttttatttaggattttattatatatttattaatatattaaattatatatttattagcgttgtgatagttttaggagtatttatatttggtgtaaatatgagtggtattagttgggtatagtggtttatatttgtgattttagtattttgggaggtcgaggtgggcggattattaggttaggagtttaagattagtttggttaatatggtaaaattttatttttattaaaaatataaaaattagttgggtatggtggtacgtgtttgtaattttagttatttaggaggttgaggtaggagaatttttttaattcgggttggggggtaggggtttttttttgggttatagagagagattttttttttaaaaaaaaaaaaaaaaaaaaaaaaaaaaaaaaaaaaaaaaggatgatattatagttttaagaaatttttatttttttttagaaatttttatgaatatttattttttggttaaagaaatttataaagatggtaattttaaattttatggtgtaattgttttttggtgtaattgttttttttgagtcggtttatatttttttttttttaatgtgtattttttattgtaataaatttttatatttttattattttttgatttatttttgaatttttttttgtagtggtgttaagaatttggatattggttagggttaaggttttattaatatttgggattttttttagtttattagttttatttggagtttcgagttttagtttttttaaggtgaacgggtattttttttggatattaggaggaaatgggaaagaagaaagtttttattttttgttattttatttttttagggtttataagatttatatattagatagtgtacgtttttttattaaaaagttaggatatttttagaggggaattattacgaggagaagtaaacgttaaattttattttttttatgttgtttaagggtagtagttgggggttttgatttttatgattttatgtttgagatgtttttttgataggtggagtgtagtggtacgatttcgggttattataatttttgttttttggtgtaggatataataaatttttttttaaaggttttagtttgtaaattgttaagtataatgagttttgagattttttttaaagaattaatgtattagttatgtttagttttttattttaaagttttcgtttttttgtttttagttttagtaaataattattttttagtttttattatttgtttcgttttgagttatttttggttatttattttgatttgagttattttgagttatttgtttttattaaattatttatttcgttattttgatttgtgtttttattttttttaaagtagttaatcggaattagtttagattgtgtagtttaattttagttaataggggaatgatatagtagtaggggttatttgtattaggaataagaattttttttttttttttatttaggtgttttttgttattgttttatttataagtcgtatttttttatagaagtaaaattgttttgttgagaaaattaaatttatgtttgagtgttatttttttggtattattgaaaatttatttataatattgg

SEQ ID NO: 31 - DNA, 5369 bp, Artificial Sequence
  chemically treated genomic DNA (Homo sapiens)
ttataggtgggttttcggtgtgtgtatgtttgatgtttgagagttagaggtagtgatttattattgcgtgtgtgtttgtgtatgtgtatttcgaggtttgtgtgtgttttggtgtgaatttggttttttttaaatatttatgtgtggttaggcgtggtggtttatgtttgtaattttagtatttcgggaggttaaggtagatggattatttgagtttaggagttggagattatagtttgggtaatatagagagattttatttataaaaataaaaaatagaaaaagttagttaggtgtcgtggtatatatttgaagttttagttatttcggaggttgaggtgtgaggattattttagttgggaggttgggtttgtagtgaattatgattatgttatagtattttagtttgggtaaaagggtaagattttattttaaaaataaaattaaattagaaatatttttgtgtggttatgaattttgtgtgtgttttgaggattgcgggtttttgtgtaatttttacgtatgtgtggatattagtatgtatgtttttgtgtttacgcgaatcgttttacgtttttaggtggtttgtaggggattggtgtagtttcgaggatatttttagttgttcgtcgtttttttatttttacgtcggtttttatcgattcggcgggagttttgagttttagttttttagagtaatggtggagcgggtagggtatttaaaatgattttatttttttagttttttaaagtgtttttagttggttatgtaaatgttttttttgtgtagcgtttcgtggatttttttttgttttattttttaattttgtgtaaagataaggttttatttcgttgtttagattttttttggttttttattttgatttttataatcgtttcgagggggtaggtcggagcgggttttgaaaatatatatttgtatattttttttagttcgcgttttttttttttaagggtaattcgtatttttttgttttcgttataaaagatatttatgtaaattattgacgtgcgaatttatatatattttttaattaattgcgtagttattttttcgttttttattttcgtttttggacggcgagaaggaggaggagttgattatgtaaatgaagttacgcgtatcgcgttgtcgaattcggtgtttcgcgttgggcggggggcgggtaggtttgtttatgtaaattatattatttgcgtgtttcgtttcgtcgacgttatttgattttaatatgtaagaaacgtttttttttagattcggttttttatattgcgttttttttttcgcgtaaagggggcggggcggaggatgtaaatgaatttcgtgtaggttacggatcgttgttttttttttttttggtaggggggttgtttcgaattttttcgtttcgtttcgtttcgtttcgcgcggttcgggtttgcgtaggcgtcgtttttttcgcggggcgcggttacgtgtttatcgggcgaggcggggcggggcgtcgcgcgcggtgggggcggggtatggcgcgttgtgcggcgtagggcggttggtataaacggcggcgtcggggtcggaggaaaaagttcggtgaggaggtcgcggggcgagaagggagcgggaggagattaagtcggagtcggggcgtcggcgcgaatcgggcggggtgtgggggcgcgcgtcggggtttgtcggggcgatttcgggaagggggatgtgggtgcggcgcgggggaggggacgcgcgtcggttacgttgggtgtcggtcgttgtgggggttggggtgggggcggggagcgcgcgtcgggcggaggtcgagtggagggggaggggagggggttcgagcggtttttaggttttgtttttgtcgtttattgcgtttagaaggggttttagggtttgtttcgggttgggggcgttggggtgttttggatgggggtatttttatttttcgttttgttttcgggtgcgtgtattttttttcgtttttttttttgtcgtcgcggatttttttttcgagggtttttttcgtcggttagtttcgggatttttttttcgtttgggcgtgtgttcgttttcggtcggttttttttcgtcgggttcgggtcgattttatcgtttcgtttcgtttcgggtttttttttttagttttttttcggtttatttttttgtttttgggtttttcgtttttttgttttggattttttagtttttttgttttttatttagaaagggaaattgaggtttagtaaaggaaagggatttttttgggttcgttattaatttattttgaaagtttgtttttaagatattgtttattgggataagttttttttatatgattttagatattatttttttattttatgttttagggtaattaataagtttaaaatttattgatttttatgtttataaatattagagtttttttaatttgtttttttttattttttttttggttaggttatggtaatttgttgattatttagtgtattttttagtgttaattttattgagaaataaattttttagatttttgttttttatttttttaagaaataagaaggaaaaggaggagttaggtttaggtgtaggttggtgaataggattagagggattgatatttgttaagttggtgttaatttttttttttatttttttttttttaaaattaataaataatttttttttttttgttttgttttttgatttttgttttttttatataggttttagagtttagtattttagaatagtttgagtaagatgttagttttgggggtgttaattttatttatttttatttgtttaaagttggtgatttagaggataggtgtaattttaaatggtttaattattagagtttgttttgtggttatttggggttttttttagggtttggttgaggtttattttagatttatataggattaatattagtatttgttttatgtttatgttagagtttattgggattaattttagattttatatggtgttatttttatgtttttttgaagtaggatatttttatgtttttaatgatatttgagataatatatagagtttttttggtattaaatatgattttaatatttttttggtgttaagtttagtgttaatttgttttttattttcgtatatatttgggggtagttttaaagttaatacgatgtttttttttttttggttatatttgatgttgatattagaattcgttaatgttattagtgtgtttattgttgatgttagttttagtatttattttttgttaaggttggttcgtatttgatttttagggtgatttaggttagttaatgaaggggggcgaggagaaagtttatattttagtttttttatttattttttgtgtgattttatttaagagggtttatggagtttagatttgtttatttttaaaatgaggatgattacgatgaattaattttattgttataaagatttaattagattatatatatttagatttaatttttttatatatgattatgtttattaaagggtaattgttttgtttattaaggaagaatttttttgaaggaaggataggagggttatttattttttttttatttatatttattttaggatttgtttttgtgtttaatattggagtttattttaattttttttgcgattgttttttttgtttgttaatagtagtagtttttgataaagtaggaatcgtttttaaaggagatttaatttatttttaaatgtgattttttttttttaaatattttttttttattggtaggaaaattaaatttagaaaggggaattaagtatatagagtaggagagatgggagtttagggttatttatatatgttttttgtttattgtttgttttttgttttttgtagatttttatataaaatgagaaatataaataataattataatattaatagggatgatataattaatttagtgggtttttttgaggatttgggttggaaattagcggataatttttgggatatttgagatttttttattatttgggggttgttattattatttttttagatttagttaatttttttgttaatcgttaattttaggtatttttttttaggtgtggggaaagtttttttgaaatatggttttggttttttattttttttttaattagagatgggtagtggaggttttatggtatttattttggttttattttgaggttttaatgaggattttgggtattaagagatagttttgggtaaaagtaaaattaagttagtttttgggtttattgttgggttgttgggttttttgggagtatttgtttggtttgttatatatttttttttttagaaattttatatcgtatagttttgggtttttttagatttcgagatttttaagtttatatgtttggagtttttttttttgagaattttaattttgtatttttcgtaatagaagatttttagatgtatagatatagtttttattttattttaataaaatttagatttttggattttttttttttggaatgtttaaatttataattttggggtgtatttttatttttagattttaaatttaaagtttaagtgtttttttatgtaaatattttaaattttttagttttatagtttatttgttgtttttttttaaatttatagttttgcggtattttttttgaagtattatagatttagtttggaggttttttttttgtttagttgttttggggtttttttatttttttttgttggttgtgttttaagttaggtggtatttatggtggggcgtgtagttgggaggtgaaataaggtgattatgtaattagttaaagtttattttttttttttaggtagtataaaggtaaattattttatttattattatttgttattttattattattatgttggttttagggttgtttttggtggttttgttggtttgtttgattgtgatggttttgatgtttgtttggtagtagaggaagagtagggggaagttgttttcgggatttattttattgttttttattggaaattatttttagttgaatatagagtatatatgtgattttattatgaaggtgttttaaggtaggaagatgggtggtatagggtgggggttgtttagttggttggggttttgtggtaggggattgattagtgtggattagagttttaggaaagggagttttggagttttagtattcgggttttagttaggaaagataggattttgggatgtttagttttttgattgtgagaatttgggggtgaaggattttagtatttgatatttcggtgttgggttttatttagagtgggggttgttttttttaattatttttattcgtttttattagt

SEQ ID NO: 32 - DNA, 5369 bp, Artificial Sequence
  chemically treated genomic DNA (Homo sapiens)
attgatggaggcgagtgggagtggttagagggagtagtttttattttgaatggggtttagtatcgagatgttaagtattgggattttttatttttaggtttttatagttagggagttggatattttaagattttgttttttttggttaggattcggatgttgaaattttaaaatttttttttttaagattttggtttatattggttaattttttgttataaagttttagttaattaggtagtttttattttgtgttatttatttttttgttttgggatatttttatgatggagttatatatgtgttttgtgtttagttggaggtagtttttaatgaagggtagtggggtgggtttcggaggtagtttttttttgttttttttttgttgttagatagatattaagattattatagttaggtaggttagtaaggttattagaagtagttttgaggttagtatggtggtagtgagatgatagatggtgatgggtggggtggtttgtttttatattgtttgaaaaagagggatggattttggttaattatataattattttattttattttttaattatacgttttattatgaatgttatttagtttgggatatagttagtaagggaggataaggggattttagggtagttgaatagagagggggtttttagattaaatttgtggtattttaggaggggtgtcgtagggttgtggatttaggagggggtaatagataagttgtagaattgaagagtttggaatatttgtataggggagtatttgggttttggatttggggtttgagagtgagaatgtattttaaagttgtggatttgggtattttaggggagaggaatttaaaggtttgggttttattagggtgagatggaagttgtgtttgtgtatttggaggttttttgttgcggaggatgtagggttaaggtttttaggaggggggattttaggtatatggatttgaaagtttcggggtttaggaagatttagggttgtgcggtgtggagtttttgggaggaggagtgtgtagtaagttaggtaggtgtttttagaaagtttagtagtttagtaatgggtttaggggttgatttgattttgtttttgtttagagttattttttgatgtttagaatttttattggaattttagagtgaggttaggatgggtgttatggaatttttattgtttatttttggttgggaaaggggtggaagattagggttatattttaggggaattttttttatatttggagaagagtatttggagttagcggttggtagagggattggttaggtttggagaaatagtaataataatttttaaatggtggaaaaattttaagtgttttaagggttgttcgttggtttttaatttagatttttagggaaatttattagattgattgtattatttttattaatattatgattgttgtttatgttttttattttatataaagatttatagaggatagaaaatagatagtgggtaggggatatgtgtgagtggttttgaatttttattttttttgttttgtgtatttagtttttttttttggatttggtttttttgttagtggaaagggagtgtttgggaagagaagattatatttgagggtgagttaagttttttttaagggcgatttttgttttgttaggggttattattattagtaggtagagggaatagtcgtagaagagattggggtaaattttagtgttaggtatagaggtagattttggggtgggtgtgagtggagaagggatgagtagtttttttgttttttttttagggaaatttttttttagtaaataggatagttattttttggtgagtatggttatatatgggaagattaagtttaggtgtgtatgatttggttgaatttttgtaatagtgaggttggtttatcgtgattatttttattttgaagatgagtagatttagattttataaatttttttgagtgaggttatatagggagtaagtgagggagttgggatgtgaatttttttttcgtttttttttattgattggtttagattattttgggagttaagtgcgggttagttttagtaggaggtgagtgttgagattggtattagtagtggatatattgatgatattggcgggttttgatattagtattaggtatggttagggagggaaaggtatcgtgttggttttgggattgtttttaggtgtatgcgaggatgggaaataagttggtattgaatttgatattaggagaatattgaagttatgtttggtgttaagagggttttgtgtgttgttttaggtgttattgagggtataagagtgttttgttttaggagggtataagggtggtattatatagggtttgaggttggttttagtgggttttgatatgagtatgaggtaggtgttgatattggttttatgtgggtttgagatgagttttagttagattttgagaggggttttagatggttataggataggttttggtggttggattatttagggttgtatttgttttttgggttattaattttggataagtggaggtgggtgaggttggtatttttaggattgatattttgtttaaattgttttaggatgttgagttttgagatttgtgtggagggaataaaggttagagaataaggtagagagaggaaagttgtttgttgattttggaggggaagaggtggaaaggaagattagtattagtttggtagatattaatttttttaattttgtttattagtttgtatttgggtttggttttttttttttttttttgttttttaaaaaggtgggagatagaaatttgaggagtttgttttttagtggggttggtattaagaagtgtattgagtgattagtaggttgttatgatttggttagggaggggatggggagagataggttgggagaattttagtatttgtggatatagaggttaatgaattttggatttgttgattattttagagtatggagtgagagaatggtgtttgaaattatgtgggagggatttgttttagtgggtagtgttttgggaataggtttttagagtgagttagtggcgagtttaggaagattttttttttttgttgggttttagtttttttttttgaatgaaagatagagaaattggggagtttaaaataagagaacgaggggtttagagatagaaaaatagatcggagggaagttgggagggaggattcggggcggagcgggacggtggggtcgattcgagttcgacgggaggaagtcggtcgggggcggatatacgtttagacggaagggaggtttcgagattgatcgacgggaggggttttcggggagagggttcgcggcgatagaggaaaggacggaggagggtgtacgtattcggagataggacgagagataaaggtgtttttatttagggtattttaacgtttttaattcggggtaggttttgaggttttttttgagcgtagtaggcgataggggtagggtttaagggtcgttcggatttttttttttttttttttattcggttttcgttcggcgcgcgtttttcgtttttattttaatttttataacggtcggtatttaacgtaatcggcgcgcgttttttttttcgcgtcgtatttatattttttttttcggggtcgtttcggtaggtttcggcgcgcgtttttatatttcgttcggttcgcgtcggcgtttcggtttcggtttagttttttttcgtttttttttcgtttcgcgatttttttatcgagttttttttttcggtttcggcgtcgtcgtttgtgttagtcgttttgcgtcgtatagcgcgttatatttcgtttttatcgcgcgcgacgtttcgtttcgtttcgttcggtgggtacgtgatcgcgtttcgcggaggggacggcgtttgcgtaggttcgagtcgcgcggggcggggcggagcggggcgaggaagttcgggataatttttttattaaggagaaaggaaatagcggttcgtggtttatacgaggtttatttgtatttttcgtttcgttttttttgcgcgggagggggaacgtagtgtgaggggtcgggtttgggagggggcgttttttgtatgttggaattaagtggcgtcggcggggcggggtacgtaaatgatgtgatttatatggataggtttattcgtttttcgtttagcgcggggtatcgagttcggtagcgcggtgcgcgtgattttatttatatggttagttttttttttttttcgtcgtttaggaacggaggtgagagacggagaaatggttacgtagttagttgagaaatgtatgtaaattcgtacgttagtaatttatataagtattttttataacggaggtaaaaaagtgcgggttgtttttgagaaaagggaacgcggattagaagggatgtgtaaatgtgtatttttaagattcgtttcggtttgttttttcgggacgattgtgggaattagaataaagaattagggaaagtttgggtaacggagtgagattttatttttatataaaattaaaaaatgaaataaaaaaaaatttacggaacgttatatagagaagatatttgtatggttagttgggaatattttaggagattaaggagataaggttattttgaatgttttgttcgttttattattgttttggagagttgggatttaaggttttcgtcgggtcggtgaaggtcgacgtggagatgggagggcgacgagtaattgggagtgttttcggggttgtattagttttttgtaggttatttgagggcgtagggcggttcgcgtgagtataagggtatgtatattggtatttatatatgcgtgaggattgtataaaagttcgtagtttttagggtatatatagggtttatggttatataagggtgtttttagtttagttttgtttttgagatggggttttatttttttgtttaggttgaagtgttgtggtatgattatagtttattgtaggtttaattttttaattaaagtgatttttatattttagttttcggaatagttgggattttaggtgtgtattacgatatttggttaattttttttgttttttatttttgtagatagggtttttttgtgttgtttaggttatagtttttaatttttgggtttaagtgatttatttgttttggtttttcgaagtgttgggattataggtatgagttattacgtttggttatatatgggtgtttaaaaggagttaaatttatattaaaatatatatagatttcggggtatatatgtataggtatatacgtagtagtgagttattgtttttgatttttaggtattagatatgtatatatcggaggtttatttatag

SEQ ID NO: 33 - DNA, 17703 bp, Artificial Sequence
  chemically treated genomic DNA (Homo sapiens)
gatggggtaggttatttttaagatggtagtaagttttttgttttttgagttggggtttttggttttatggattttaaggaattgaattttgggttatgtagtgagtgttatagttttattagaagttatgggttatggaagagaatcgtggaatttagtgattagtgtttagttcgattagaataaatttaggtatttagttatggaagaatagtggtgagtttttagtttgattgggagtagtaatgggtgttttgttgggttaggagtgtagcggatattatgttggatttggaggggtggaagttagtggtatatcggtaggcggtatttagtagtggtggatagcgagtaaaagtttagtttaagttggaataaatatggattagaagagtgtgtattggtaagatttaatagagtgaaaatagagttttaatataaagagaggggatttaaagggggttgtttatttttggttttaatgtttggggtttatattttaattattgtttttttttttgtgtttttagatgatagatgatttgattatttttttattttttatttttagtttaattggtattttagtgagttttttttattatttgattggttaggtgtgagttgagttataagatttttgtttaaaggtgggtgtagttattttttttagttaggtttaggaatttttagtcggtttaggaaatttagttagttttgttttttagtatttttttttaataggaaaatttaagtgttgttggggaggttggttaataattgtattaatttttttttgttgaatgggggtataataggggttatgtagttgagatttttttaggagggatgtttttgatgttattaatattggagtatgggttaggaggtagatttaggggtttgtcgtagattttagttatggattgtatttggggtttcgtttgaagaattatttgtagttttatagttttaattttggaagagataaatttaataaggaggttaaagatatagggattgaaatgtttggtttgaagtgtaggggattatttttttggtatattttataggttttgattatttgtttgatagttttgaaaaggtttggtttagtaaataatgatttggttattggatgggtgttattaacgtttaaatgaaaggtttggtgaagggttttaagtaatttttattggttagttgtaggtaaaagtatttttttttttttggtggttagatattttgaggggagggaattatgtttttgtgaggtattttattttattttttttgttgagtattggggtttggttttttggaggggattattttatattagggttttttttataagtatttttaatggagggtttcgttttgtggttttttggttttaatatttgtttggtggtttttttttatttttttttttttttttttttgatgattttagtagtgtaagatggttatttttttaggttttcgtatagtttataataatttataatggttttttgatgtttaataggtgtttttttagaagttaggaattttattttttattatatttttgtgtaggtatggaggagaaggtaagtataattagagtgtttatatatatttatttttttttttttttttaattttagtgtattatggtttttgtttttgttaggatgtttttttttaataaaggagtggggtttttaggtataattagaaaggtatgtgaaaagagtaaagttttttagttataatttagtggttgggcgaagtaattagtgattgtttgttttaggatttttcggatagtaatagatttggaaatttagttagttttgttttttaaaattataatgataaataataagagaaaaagaaaggaagaaaggatatatatatataaagaagttaattaataatatgataggattaagtttttatatattaataataattttgaattaaatggattaaattttttatttaaaagaaagagattggttgaatggatttaaaaagtatgatttagttatatgttgtttataagaaatatattttattaggaaagatatatatagtgaaagtaaagaaatgagaaaagatattttatgtaaataaaaattaaaagtgagtagtaatatttatgtttataaaggaaatagattttaagttaaaaattgtaaaaagagataaagaaggttaatatataatgataaaaggattaatcgagtaaaggatttatgaggaaatttttgtttaataaattttggttagatcggttgtttgtttttaaattttgttttttgataagatgttattaatgataatgtttgttcgaaattttattgtaattttaattttatttcggttttgtggttttgtgatttcgttttgtttttatttgttttgttatattttattattttgtgaagtatgtgatttttgtgatttatattttattcgtatattttttttttttttgaaaattattaataaaaattttttggttttacggtttagggggtattatggaatttgtcgatatgtgatgtttttttcggatttttagttttaaaattttttttttttgtgttttgtttttttattttttaggttggtcgatatttagggagaatagaaaagaatttacgtggaatattgggggtgaattttgttcgatatttggttgaattttttttgataatgttattttttatgtttatgtgtatatattgtttagtatttatttatgaatgagaatatgtgatatttattttttgtgtttggtttgttttatttaagataattttttttagttgtatttatgttgttataaaagatattattttatttttttttatggttaaatagtatttaatggtgtatatatattatattttatttaattatttatttgttgattttttatttttgttattgtaaatagtatttggattatattttaagtatttaattagtggttatatgtagtaagtgattattatattggataatgtagttttaatttattgtatgattttgggtaagatttgtaaattgttattgttttaatatttttatttataaaatggggatggtaataatattttattaagagtgtaaagattgagttattgtgtgtaaagtattttacgtttttttatcggtgttttattttggggttgtaatgagtatttaattttagtgttagatgatatagtatagtaagatcgaggtttttggtttaggaaagtttatgttgttatttttttagggttaggaaagtatagtttttattttttataaataggattgtttgtttgttttttttgggttaaagtaatttcgggtttaggttttggatttagtaaagggtttgtttaatattgtaagaaagatgttgttttatggttaaaagttaggcgtaggatgagataggtagatacgtatatatttatatttacgttttgtaaagatggattgattttgttagaggatgtgtgggtgaaggtgtatagtgaggatagagatatatgggagtttagtagatattaattaaattggatttagtttgtatatatttggagtttaagagtttttagggggaaaatagagatataaagttagatagagagagagttagagaaattttttgtatcgtgaagatagttagaggtagggaagaaattttttagtattagttagagtgattagaaattaagaggatttgatcgttgtatttgttaggttttagtttttgtttttttttaattgattatttttttttttgagatttattagttttgtattttttgtttttttttttgttttttcgattatttttatttgtggttgttatagaagggcggatgaaggaggggatattggagatagatttagtatttgtaggtttttaaagagaggggttaggagatttattaatatattagtataaatatattagtatatatagatatatataattggtttatgtattgttaggttatagtttgttatgttataaaggtagtaggttaaatttgattgaattgaataattttttatttttattagttttttttttttttttttttttttttttttttgagatggagtattgttgtgttatttaggttggagtgtagtggtgtaattttggtttattgtagtttttattttttaggtttaagtgatttttttgttttagtttttcgagtagttgggattaaaagtatttattattacgttcggttaatttttgtgtttttagtatagatggggttttgttatgtgggttaggatggtttcgaatttttgattttaattgatttgttttttttagttttttaacgtgttgggattataggtgtgagttatcgtatttagttagttttttagttttgaatatgtattattattatttttataatatataaatgtaaatgtattttcgtatataaaattgtataaatataaggaagtttatatatatgtaaggatatatatataagtatttttagatttaattatagaaatatacgttagtatatttgtataaatttaaatatttttttatatgtaaaaattatataagtatatatagggatgtaagtaggtatggataaatgtatgtaagtatagataaatagataaagttaagtaaaaaagtgtaagtttatttatgtttataaaaatagatatatatatatttataaatttatatatttatatatttatttgtttatttggattttgatatttttattattgtatttttgttaatatttatagagtgggtaaagggataggtattaggttattgggttgtttaagtaggaagtttgggttttttaataattttttttaagttaatgtttttggatgatgatgaaaaaggaggtggggaatggatgaaattttataatagggtgtagaggtagggttaggataaaaggtttagttggaggttgtagtagggtgtagggtagttagattaggattatggaatttagcgttttttttttttttgtattttttataggatttttgttatttttggtttagcgttattttaatatttatgatcgttttttattagggtttcgttttttgttttttttgggaaattttttgtagatggatagaagaggtttatttaaattttttttgagggtaagatatagacgaatggggtttgagggtgagttgttttttgttttggtatttggggaagttttattaaatagaatgaggtagatttttagagttaggggtggtacgggtatggttggtgagtacggagtatggtgaagtatgatgggtggtattattaggagaaaagtattaaattaaatttagtagagtttatttgagtaaagaagtgatttatgagttggatagttttttaaattaggaaagatattatacggtagtatggttaagtggtatttataggtagaaaaaggaggtgatatatagaaatagtttgattggttatagattatagtttgttttatttggttataatttgagtagtttgtagtttgtgtggattgaaagtttagttgttttgattagttaatatttggttatttgttataagaatatatttatttgggttaggtgtagtggtttatgtttgtaattttagtgtttttggaggtcgaggtggtggattatttgaggttaggagttcgagattagtttggttaatatggtgaaattttgtttttattaaaaatataaatattagttgggtatagtgatgcgtgtttgtaattttagttatttaggaggttgaggaaggagaattatttgaatttaggaggtagaggttgtagtgagttaaaattttattattgtattttattttgggtgatagagtgagatttttttttaaaaaaaaaaaaaaaaaaaagaatatatttttaagttaggttgtagtttattttatagagagagttttaggttaaatttaatttaattaaataattttttttttttggttagttttaaaattttgagattgattaaaattttgggtattaatattatttttgttattattataatggatttgtttgtttttagtatggaatttataatggataatgttaacgtagttgagtgattttttattttttttttatgtttttgttgtttttattgtaatgagtttattggatgtataaagaatggttgtatatgagtatttaagattttttttttttttgagatagggttttattttgttagttaggttgaagtgttgtggtatgattacgttttattgtagttttgattttttaaggtttaagtgatttttttgttttagttttttaagtagttggaattataggtgtatgttattacgtttagttaatttttgtattttttgtagagatagggttttgttatgttgtttagattggttttaaatttttgggtttaagtaatttatttgtttcggttttttaaagtgttaggattatatgtgtgagttatcgtattcggttaagatttttgagaaaatataatatattagggagattgttatgatggtttttaggagggtaatacgaagaaaatgaagttattgggtttgtaataaattttgaggaatgtggatttgggggtatagataaggtttattgtttatagagagaagaaaggttgttaatagttttttttaatttgagtgtgtttatgaattaaattgattaaaatcgaataattcgaagtttagataataaagatagtttaatagtattagagtttaattggttatagattttgtttagggtatgatggtaattaaggattagagtttgttataaaataatttgatttatagagatatttatttgtagttggtttggtaatatatagtattttggagatttattagaagaaatattaagagtagaaaagtttgggatagttaggtttgttgtgttagtttatttttatattgttataaagatatatttgagattgggtaatttataaataaaagggatgtaattgatttatagttttatatggttggggaggttttaggaaaatataatttatggtaaaaggtgaatgagaagtaggaaatttataattatgatggaaggtgaaggagaagtaagtattttttttataaggtggtaggaaaaagagagagagttaagggggaagagttttttataaaattattagattttgtgagaatttatttattattataagaatagtatgggggaaatcgtttttaggatttagttattttttattaggtttttttttttatatttggggattataatttaagatgagatttgggtgaggatatagagttaaattatattatttattattattatttaggatgtttgtaaattaattgttagttgtatttgtaaatatatatttgttttttttttttgagaaatgtttttagtgtatttgtggtagtgtttagagaaatagtagtgttagtcgtattttaaattaagttatttgtattagtgaatttattggaaagataagagtaatatttggttttttttagtattatatataagtttttaagatgggtatagaggagatttaaaattgcgtgatgttttattaagcgtttttgttgttataaatgtttttattttagtttggagagtggtttttatttatttgaattttttggaggtttaattagttgtaaaatttaagatgttttttaatgtataatttagttttagattttatataattgttatttaaatattattaagaatgagtatttaggaatttaattggaattttttttgaatagaaattaatttattttcgtcgattttgaggttgatagtaattttagttattgattgttttggtttttaattatgggaggtattaggaaatttttagggaaataatttggaaagtagtagtgagttaggttaaatagtaagttttggatttgtgaggagaaagaatagagtaagtaaattttaagatatttaaggtaggtattcgtggtgttggaaaagagggttatttattggtattagagtagagattagttagatttgtttatttataagtttgtatagtttttgaataaggtgggaaatttatttttttgtggtttttttttagtatgttgcgaaggtgtataattatatttagttggaaagagattttattgtatttatttatttatttgtttttaatagagttggggtcgtgttatgttgaatttttggttttaagtaatttttttattttaattttttaaagtgttgggattataagtatgagttattatgtttggttattttatatatttaatttagtaatattatatacgtaattgtttatatttttataggtagtttttaggttttgtatacgggatgtttggaagtaaaatatgttttttgtagttattatttagatatattttttatatttagtagtgattatgttattagttagttaatagtatgttattacgtattgttattatattaattaattaataatataattattattaaatatttttagtgagtgtaaaaaagtaagtggtaatgatgtttagaatattaagatatagttttttattttttttttggggtttttgggtgatttttattgggaatatgaagaggtattggtattagtgaaattattttttgattttggggcgttggtttagaaatttaataattttttgttttttttgtttgtttgtttgttttgttagagtataagtttttgttaaagttatttatagattatagttttatggatttttttgtaaggaaagggaaagggttaggatagtaagaaatggggaagaaaggataaaagataatgtttttatgatggaagagaaattttgatttataattttggaaaagttgttcgtatataagatgttaattgtttttggggaaaaatttttttggttagttttgttttaaggtttttaatagatatatagttttaggagtttagaagggttttttttaatggagagatgtggatttaagattcgagattttgatattttgttatagagaagaatttggtattgttttttttaatggagtataaggaatagttttagaagaatttggtacggttttttttaatggagtttaaggatagtttgtttggtgttatttttaaagggtttaatttttaaattttagattatgaaaggtttggttgttattaatcgatgtgttattaatgatttattttatttggtgaaaatatgttttggtataaagtattatagttttgtattattgagttatattagagtttataagagtgggagatatatgagattttattattaggggtataggttttttattattattttataagagatttatttatgtttttttagtaggagtggatttgattgttattaattaataatatttgagattaagggattttaattaatttagtatgttttgtttaatgatatttgtttgtaatattgttgcgggataattaaagattggagagattaaaaaaggtttaggagagtttattaaattaaggtgattatcggtttagttagatatatatttagaaagtttgagtttcgaataaaggttttttttatttttaaatatattaaggtgggaattatatgaggtaggaagttagttttagaagtgagaaataaagtagttaaataatattttttatattttgagaaagatatgttttgtaatttaattttatcggttcggtgattttgtagttgtgtaggaatttattgggtttgtaataaattttgagggatgtggagttggggagtataggtaaggtttattgtttatagagagaagataggttgttaatatttttttttaatttgaatgtaaggtgtggttatattttgtagtaattttaagaggattttaaaatttatattattattattattaggttatagttgattttattaattttttttttaatattttatttaattgttttattatttgtttagtgaaataagtatttttgttattggagagttttttaggaatgtttagtaaggaaatatattttttaataattttttatttacggttatggtattgattgatttttgtgtatagaaatgttttaatataattagaaaatatgtaatgaagttggtagttgaattaattttagttttaagtgtttaaatgatttattaagtgttagaaatatattatttgaggtttttgttgttttattagaattatggatttgataaattaaatattagttataaattatttagtaattttagaatagttattttattaatatttttttattgtttggattatttttttttttttatgatgagttatggaatacggagtttttagtaatggaaattttaagaatttaggaaggattaggcggttatttagggtttttatgagtgtatgttttatattggaattatagattttaaagtataaattttaatataatgagttgtaatttatgtttttttaatttaggtatataatattggtttattaaataggttattataggtaatttgatggtgttattgtattttagtttgggtaatagattgagattttgtttttgaattggaattgtacgggggtattgtttttggaggggtgaatgggtatgaagaggtgtttgggtatgagttataggtatagaattttatttttttttgttattttttgttatattttgggtatttgtttgttattgaaagaatgaggtaaaagaggtggtggtacgaattaaatagattttgttgtgttaatgagagagagtagattagtttatgttagtgttaggagagtggaggagagagggagagtaggagaggagtgtgggtagggagtgtttattaatagtatatatagtgttttatatcggtaattgttattggtttagtatttatttgggttattattgtttattatgtttgattttatgattaattatttatttattattattaatttattaatttattttttaatgggagaattagaatattgataatattttttagtttttttttttttttttttttttatgttgattatatttttgaattttaggttcgttatttttttattattaatagagttatttttttaatttttgattaatggtttttttaatgatattaagtatagagtatatatgttaatattattatgaatttttaaattatttgtttagatagaatatatggatatataaatgatgaatgtgataattgttatatatatatatttattttagatatttagttaaaatatgtggtttttggttattagttagatattgttattttatttggaagatataaggtaattggttatagatttttaaattatgaaatatttagattttttaggggaatgatatggagggagttaaggagttttatgattagataagatgttgtttgggtggtttacgatattattgggtaatatttaaagaggtggtggtttatatttgtaattttaatattttgggaggttgaggtgggaggatcgtttgaagttaggagttagaaattagtttgggtaattaaataagatttggttttataaaaaagttttaaaaatttagttaggtatggtggtatgtgtttgtagttttagttatttgggagattgaggtaggaggatgatttgagttttgtagtttgaggttgtagtgagttatgattacgttattgttttttagtttgggtatagagtaagattttgttttttaaaaaaaaattatttgtaatgtgaggagtgataatatttaggaacgtgtgtataggtttaaatgttggttaaagatattttatataattcgttgaattttttttttaagggtttttttttaagttttgtagacgttatttgggtataaattatgtttttgttaatagaatttgttgttttttttagtttttggtattttattgttcgttttttttatgaaagttggtatggttattgaatattttaattttttataaatttggaaataagtaaaattgttaatgaaatttgtatttgtttaaaatgagtttttttttttttttttttattattattatattttaagttttagggtatatgtgtatattgtgtaggttagttatatacgtatatatgtgttatgttggtgcgttgtatttattaattcgttatttagtattaggtatattttttaatgttattttttttttttttttttattttataatagtttttagagtgtgatgtttttttttttgtgtttatgtgattttattgtttaatttttatttatgagtgagaatatgtggtgtttggtttttttgtttttgcgatagtttattgagaatgatgatttttaattttatttatgtttttataaaggatatgaatttattattttttatggttgtatagtattttatggtgtatatgtgttatatttttttaatttagtttattattgttggatatttgggttggttttaagtttttgttattgtgaataatgtcgtaataaatatatatgtgtatgtgtttttatagtagtatgatttatagttttttgggtatatatttagtaatgggatggttgggttaaatggtatttttagttttagatttttgaggaatcgttatattgatttttataatggttgaattagtttatagttttattaatagtgtaaaagtgtttttatttttttatattttttttagtatttgttgttttttgattttttaatgattgttattttaattggtgtgagatggtattttattgtggttttgatttgtatttttttgatggttattgatgttgagtatttttttatgtgttttttggttgtataaatgtttttttttgaaaagtgtttgtttatgtttttcgtttattttttgatggggttgttttttttttgtaaatttgtttgagtttattgtagattttggatattagttttttgttagatgagtaggttgcgaaaatttttttttattttgtaggttgtttgtttattttgatggtagttttttttgttgtgtagaagttttttagtttaattagattttatttgttaattttgttttttgttgttattggttttggttttttagatatgaagtttttgtttatgtttatgttttgaatggtaatgtttaggtttttttttagggtttttatggttttaggtttaacgtttaagtttttaatttattttgaattgattttgtatattaaaatgagtttttaaaaggatttttgtggttattttattagtttatagaaagtggaggtttgtttggaatgatattaaagaattttttttattttaattgttttagagatagggttttagtttgttatttaggttggagtataatggtatagttatagtttattgtagttttgaatttttgtgtttaggagatttttttattttagtttttagagtagttgggattaaaagtgtgagttattatgttttattatttatttttgtagagatgtgtttgggggacggttttattatgttgtttaggttggtttcgaatttttggatttaagtaatttttttgttttaattttttaaagtattgggataagttttgtatagatatgtttgattttttttttttttttattgtagtaaagatttttatttttttatagggaggatttggggtaaattgtttttgtcgttgttattgttatttgaggatgtgggtgggttattttggttaatgttagtgtaagaacggtgtttgttttttattattggggttttttagttatttaggtaggtagtagtttttttgagaagattttttgatttttaggtttttattatatgtttttatatattagttgtttttttttattgagtttatgtttttgatagtgttgtatttatttgtgattttgtggttgagtttttttttatatttttagataaggaaggtttgtgaggtattagtatagtgttgaatatagtatttggtatataataggtatttagtaaatatgtgaataggaataaatgaaggagttagtgagtgaaagttttaagtttgatttagcggaattggtagtcggttagggtttataaagtgttgtttggtttttagtagggggtggtagatttggggatttttttttattaaatagagttgtattatataggtaaaggttttaagtgtttattgttttttttttattattttttatgtgtgataagagtattacgtaattatgtgaattaatggatttagtttttttattagattaatgtgtttaggaattatttgtgttgttatggggattttttaggtgttatttataattatttgtggataagatgaggtgttatttttattttagaattagggatggtggttgggtatggtagtttatgtttataattttagtattttgggaggttgaagtaggtggattaattgaggtcgggagttcgagattaatttgattaatatggagaaattttgtttgtattaaaaaatataaaattagttgggtatggtggtatatgtttgtaattttagttattcgggaggttgaggtaggagaattgtttgaatttaggaggcggagtttgttttgagttgagattgtattattgtattttattatgggtaataaaagtgaaattttattttaaaaaaaatttaaatagaaataaataaataaataaaattagtgatagtgatgtttagtttggggaaagtatttgtttagtggtatataattgggaaaaggggaagttgagatttagtaggaggtttgtttttaaagtttttttagattaaagttgtttaataatttgtggattatgaaatttttatagagtttgattaaagttgtggtttttttttttttaaataggtatatatatgtttgtataaagttgtgaggttttatatattttttaaaatttttttataaattttttaaggattttttaggtatttacgattatttattatgattgtattttttgggggtggggtaaagagggagggtatgagtaagtgtgtattagggttgaggaaggtggcgttgttgtttttttattttttaataagtttttagattttttttgatgttagagggatgtgggttcgtgttttagatttaattcgtatgtattgagttatagttttttttttcgttagttaagattatgataatgagaatgtgtgtttttaaggtggttgtgaggattaaatgggatattgtatatagttagtatataataagtgtttattaaatggtaattattttgatttatttatttatttatttacgaatttaataataatttattgggtattttttatgtattaggaaatagtttaggaattgatgatgtggtattttggataagatatacgaggttattgcgtttatggatattttattggtagagatagataagtaaaaaataaatagataaggaaatgttaggtggagaagagttataattaaattaaagtagggggatattttagatagtgatgagaattacgttagattgagtggttaggggaagattgttttgtttttttttttgagtagagataatgaaagatttaggtggaaggtattagaaggaggtaggggtggttataagaattttgaaataggaaaaatgttagagaataatatggaggaatgagtgggaggagaagttagagcggtaatagggttacgttatgtaggattatgtgaatttttagtggagattttagattttatttttagtaaagtgggaatattgtaggttttggtgagtacgtggatattaattattttatattttagtggggttattttggtttgtggggtagtgaaataattgttaagtggagtaagtatgttatttagaagtttagtgaaggggttttgtagagattaatgtagggtatttgtaagtaaatttaataaattttatgatttttatgttaagtttttattgaatttgaatattattgtaaaaagcgtatagtttaatgaatttttataaattgaatatatttatgtaattgatatgtaggttaagtagtaagaatgtttcgaaattttgtattttgtttttttttatttattatttatttattattttgattatgggttgattttatttgtgtatgaattttttttttgtttttgtttgtttgtttttgagattgaattttgttttgtcgtttaggttggagtgtagtggtattatttcgttttattgtaattttcgttttttcgggtttaagtaattttttcgttttagtttttcgagtagttgggattataggtgagagttattatgtttggttaatttttgtatttttagtagagatgggtttttattatgttggttaggttggatttaaatttttgatttcgtgattagtttgttttagttttttaaattgttgggattatagatgtgagttattacgtttggttttgtgtttgaattttatatatataaaattatgatgtattgatttttttgtgtttagttgtttttatttaatattatgtttgtgagttttagttacgttgtcgtttgtagttgtggtttgtttttttttgttgttgtatattagtttattgtgagaatttttattgattgtttatatttatattgatgagtattttattaagaaagtttttgtgaatattttgtttattttttggtgaatatatatatatatttttgttgggtatgtatttgggagtgaagtggttggttttttgggtatttatttgtttagttttaggaaatattgtttagtagttttttaagtggttgtatagtaattttattttatttattggagatattttttgagatttttagtggatgtttgaaattttatataatattgagtattatgtatatttttttttttttttatataattatattatatagggagggtggtatatatagtgtagatatggtggataaaggatgattcgtgttcggggtgggatagagtggatggtgagagatattattattttatttagaatgatgtataatttaaaatttacgaattttttatttttggaattttttatttaatatttttagattgcgattagttgtaggtaattgaaattgtaaaaagtaaaattatagattataagaagtatgcggtgggggtgatatttatcgtattttattaattatttttattgtttagggtataagttaattagagtagattttggttgggttatttattaatttaagtttgtttaatttgttttattttgttgttgttttgttttgttttgttttagttttttagtagtttgaagttatggtttttagtttttgtttttagtgatatatagaaaggaaggatgaggaaggggttttattggtttaattagaaacggaaattaagaatttatgattgtatttttttttttggatagcgttaattattaatttttaattgttgggttttagtaggggaaagggtagtttggggaggcggatgttggggaggggttaattattaatttggtatgtaagtattttgatagttttataaatgaggtgtatgttgattaatagttatttttggtgtggatgtgattggtagt

SEQ ID NO: 34 - DNA, 17703 bp, Artificial Sequence
  chemically treated genomic DNA (Homo sapiens)
attgttaattatatttatattaggggtggttgttagttagtatatattttatttgtaaaattattaaaatatttatatattagattggtaattagtttttttttaatattcgtttttttaggttgtttttttttttgttgggatttagtaattaagggttaatggttaacgttgtttaagggagagaatatagttatgggtttttagttttcgtttttggttgggttagtaaagttttttttttattttttttttttgtgtattattggagatagaaattgaaaattatggttttaggttgttaaaaagttaaaataaaataaaatagaataataataaaataaggtaggttggataagtttaggttaatgggtggtttagttagggtttgttttgattggtttgtgttttaaatagtaaagatggttgataaaatacgatgaatattatttttatcgtatattttttatgatttgtggttttgttttttgtagttttagttatttgtagttaatcgtagtttgaaaatattaaatggaaaattttagaaataaagaattcgtaagttttaagttgtgtattattttgagtaggatgatgatattttttattatttattttgttttatttcggatacgaattattttttgtttattatgtttgtattgtgtatattattttttttatataatgtgattgtataggaaaaaaaaagagtatgtatagtgtttagtattatgtggggttttaggtatttattgggggttttagaagatatttttagtggataaggtgggattattgtgtagttatttggggaattgttgggtagtattttttgaagttgaataaatggatatttaggaaattagttattttatttttaggtatatgtttagtaaaaatgtgtatgtgtgtttattaaaaaatgaataaaatatttatagaagtttttttaataaaatgtttattaatatagatatagataattagtgagggtttttataatagattagtatatagtaataaaaaagaataaattatagttataggcgataacgtggttgaaatttataggtataatgttgagtggaagtaattaggtataaaagagttaatgtattataattttatgtgtatgaagtttaaatatagggttaggcgtggtgatttatatttgtaattttagtaatttgggaggttgaggtaggttgattacgaggttaggagtttgagtttagtttgattaatatggtgaaaatttatttttattaaaaatataaaaattagttaggtatggtggtttttatttgtagttttagttattcgggaggttgagacgagagaattgtttgagttcggggaggcggaggttgtagtgaggcgagatagtgttattgtattttagtttgggcgatagagtaaaatttaattttaggaataaataaataaaaataaaaaagaagtttatatatagataaaattaatttatgattaagatggtaggtggatagtgaatagaaaagaatagggtgtagggtttcggggtatttttgttatttggtttgtatgttaattatatgagtatgtttagtttgtgaaaatttattgagttgtgcgttttttatagtgatgtttaagtttaataaaaatttgatataaaagttataaaatttgttaagtttatttataaatgttttgtattgatttttgtaaagtttttttattggatttttggatgatatgtttattttatttaataattgttttattgttttataagttagggtaattttattaaaatgtaaaataattaatatttacgtgtttattaaggtttataatatttttattttgttgagaataagatttgaagtttttattgagggtttatatggttttatatgacgtggttttattatcgttttgatttttttttttatttatttttttatgttgttttttgatattttttttgttttaggatttttgtagttatttttgtttttttttagtgttttttatttgaattttttattgtttttgtttagaaaaaaaaataagatagtttttttttaattatttaatttaacgtagtttttattattgtttgaaatatttttttgttttagtttaattgtagtttttttttatttaatatttttttatttgtttattttttgtttatttgtttttgttaatggaatgtttataagcgtagtgatttcgtatgttttgtttaagatgttatattattaatttttagattattttttggtatatagaaagtgtttagtgaattgttattggattcgtgaataaatgaatgagtggattaaggtagttgttatttaatgagtatttattatatattagttgtatgtaatattttatttaatttttataattattttaggggtatatatttttattgttatgattttaattgacggaagagaaaattgtgatttaatgtatacgggttgaatttgagatacgagtttatatttttttgatattaaaaagaatttggaagtttattgggaaatggagaagtaatagcgttattttttttagttttgatgtatatttgtttatgttttttttttttattttatttttaagagatgtaattataatagatggtcgtgaatatttagaggatttttggaaggtttatgaaagagttttagggagtgtgtgaagttttataattttatgtaaatatgtatgtgtttatttggaaaagagggggttatagttttaattaaattttatgagaattttataatttataaattgttaagtagttttagtttaggagggttttggagatagattttttgttggattttagttttttttttttttagttgtgtgttattggataaatgttttttttaggttgagtattattattattaattttgtttgtttgtttgtttttgtttgggttttttttgagatggagttttatttttgttgtttatgatggagtgtaatgatgtaattttagtttagggtaaatttcgttttttgggtttaagtaatttttttgttttagtttttcgagtagttgggattatagatatgtgttattatgtttagttagttttgtgttttttagtatagatagggtttttttatgttggttaggttggtttcgaattttcgattttagttgatttatttgttttagttttttaaagtgttgagattataggtatgggttgttatgtttagttattatttttaattttaagatgagggtagtattttattttgtttataggtagttgtaaatgatatttggaaaatttttatgataatatagataatttttagatatattagtttagtgagaaaattaagtttattgatttatatgattgcgtgatatttttgttatatatggaaaatgatgaaaagaaaataataggtatttgggatttttatttgtatgatgtaattttatttggtgaagagggatttttagatttgttattttttattgagggttaggtagtattttgtaggttttggtcgattgttagtttcgttgagttaggtttggagtttttatttattgatttttttatttgtttttgtttatatatttattaaatgtttattgtgtattaggtattatgtttagtattgtgttgatattttataggttttttttgtttggaagtgtgagggagagtttagttataggattataggtaaatgtagtattattaaggatataggtttagtaaggaggggtagttggtgtatgagagtatatgatggggatttgggggttaggaagtttttttaagggagttgttgtttgtttgaatagttaaggaattttaataatgaggagtagatatcgtttttgtattgatattaattaagatgatttatttatatttttaaataataataataacgataaaaataatttgttttaagttttttttgtgagaaaatggaaatttttgttgtaataaaggaagggagagggttaaatatgtttatgtaaaatttattttaatgttttgggaggttgaggtaggaggattgtttgagtttaggagttcgagattagtttaggtaatatagtgagatcgttttttaaatatatttttataaaaataaatagtggggtatggtggtttatatttttagttttagttattttggaggttaaggtgggagaattttttgagtataggagtttaaggttgtagtgagttatgattgtgttattgtattttagtttgggtaatagattgagattttgtttttaaaataattaaaatgaaaaaaattttttaatattattttagataagtttttattttttatgaattaataaggtagttataaagatttttttgaaaatttattttagtatataaaattaatttaagatggattaaagatttaaacgttagatttaaaattataaaaattttagaagaaaatttaggtattattatttaggatataggtatgggtaaggattttatgtttaaaaaattaaaattaatggtaataaaagataaaattgataaatgggatttaattaaattaaagagtttttgtatagtaaaagaaattattattagagtgaataggtaatttataaaatgggagaaaattttcgtaatttatttatttgataaagggttaatatttagaatttataatgaatttaaataaatttataagaaaaaaataattttattaaaaagtgggcgaaagatatgaatagatattttttaaaagaagatatttatgtagttaaaaaatatatgaaaaaatgtttaatattaatggttattagagaaatgtaaattaaaattataatgagatattattttatattagttagaatggtaattattaaaaagttaggaaataataggtgttggagaagatgtggagaaataggaatatttttatattgttggtgggattgtaaattagtttaattattgtggaagttagtgtggcgattttttagggatttagaattagaaatattatttgatttagttattttattattgggtatatatttaaaggattataaattatgttgttataaagatatatgtatatgtatgtttattgcggtattatttataatagtaaagatttggaattaatttaaatgtttaataatgatagattggattaagaaaatgtggtatatatatattatggaatattatgtagttataaaaaatgatgagtttatgttttttgtagggatatggatgaaattggaaattattatttttagtaaattatcgtaagaataaaaaaattaaatattatatatttttatttataggtgggaattgaataatgagattatatggatataggaagggaaatattatattttggggattgttgtggggtggggggaggggggagggatagtattgggagatatatttaatgttagatgacgagttagtgggtgtagcgtattagtatggtatatgtatacgtatgtaattaatttgtataatgtgtatatgtattttaaaatttaaagtataataataataaaaaagaaagaaagaaaatttattttaggtaaatataaattttattgatagttttgtttgtttttaaatttgtaaaggattgggatatttaatgattatattagtttttataaagaaagcgggtagtgggatattaagagttagaaggaatagtaaattttgttaatagaggtatgatttgtgtttagatagcgtttgtagagtttgggaaaaaatttttagagagaaggtttagcgaattgtgtaggatgtttttgattagtatttaaatttatatatacgtttttaaatgttattattttttatattgtagatgatttttttttaagagatagggttttgttttgtgtttaggttggagggtagtgacgtgattatagtttattgtagttttaaattataaggtttaagttatttttttgttttagttttttaagtagttgggattataggtatatgttattatgtttggttaaatttttaaaatttttttgtagagttaggttttgtttggttgtttaggttggtttttaatttttggttttaagcgatttttttattttagttttttaaagtgttgggattataggtataagttattatttttttgagtgttgtttagtggtgtcgtgagttatttaaataatattttatttaattataagattttttggttttttttatgttatttttttgaaaaatttaaatgttttataatttgagagtttgtgattaattattttgtattttttaggtaaagtgatagtgtttaattgataattaaagattatatgttttgattaagtgtttaagataaatatatatgtatgataattattatatttattatttgtatgtttatgtattttgtttgagtaaataatttaaaaatttatagtagtattggtatatatattttgtatttggtattattaaaaagattattgattagaaattaaaaaaataattttattaatagtaaaaggataacgagtttaagatttaggagtatggttaatatgggagggggaaggggaagaggagttggaaggtattgttagtgttttaatttttttattggaaagtgggttgatggattagtaatgataagtagataattaattataaaattaggtatggtaagtagtgataatttaggtaaatattgagttagtggtagttatcggtatagggtattatgtgtattgttgatgagtattttttatttatattttttttttgtttttttttttttttttatttttttggtattgatatgggttagtttgtttttttttattggtatagtaagatttatttgattcgtgttattattttttttattttatttttttagtggtaggtaggtatttaggatgtaatagaggatggtagagaagagtgaaattttatatttgtggtttatatttagatatttttttatgtttatttatttttttaaggatagtgttttcgtgtagttttaatttagagatagggttttaatttgttatttaggttggagtgtaatggtattattaaattatttatgataatttatttaataaattagtgttatgtatttgaattagagaagtataaattgtaatttattgtattaaaatttgtattttagagtttgtaattttaatgtgaagtatgtatttatggagattttagatggtcgtttggttttttttgagtttttaaaatttttattattaaaagtttcgtattttatgatttattatagaagagagaaaatgatttaaatagtgaaaaaatattgatgaggtgattattttaagattattaaatggtttataattaatatttggtttattaaatttataattttagtaagataataaaaattttaggtgatatatttttggtatttggtagattatttgaatatttgaagttggagttaatttaattgttagttttattgtatgttttttggttgtattaaagtatttttatgtataaagattaattaatgttataatcgtagataaaaggttattagaaaatgtatttttttattgggtatttttggagaattttttagtgatagaggtatttgttttattagataagtggtaaaatagttaaataaggtattgaagaaggaattaatgaaattaattataatttaatagtagtagtaatataaattttaaaatttttttaaggttgttgtaaagtatgattatattttatatttaagttaaaagagaatattaatagtttgttttttttttgtggatagtggattttatttatattttttaattttatattttttaaagtttattataggtttagtgagtttttgtatagttgtagggttatcggatcgataaggttaggttgtaagatatgttttttttaagatgtaagaaatgttatttaattgttttgttttttatttttgaaattggttttttgttttatgtagtttttattttaatatgtttaaaagtaggaaaagtttttgttcggggtttagattttttggatgtatgtttggttgaatcggtgattattttaatttaataaatttttttgaattttttttggtttttttagtttttgattgtttcgtaatagtattataaataaatattattaggtaaagtatgttgaattgattggagttttttggttttaggtattattgattgatggtaattagatttatttttattggaaagatatagatagattttttgtaaaatagtaatagagggtttatgtttttaataatagaattttatgtattttttatttttataaattttgatatgatttaataatgtaaggttataatattttatgttaaagtatgtttttattaggtaaaatgagttattgatgatatatcggttgatgataattagattttttatgatttagaatttagaggttgggttttttggaaatgatattagataaattgtttttgaattttattggaagagatcgtattaagtttttttaagattgttttttgtattttattgggaaggataatgttaagtttttttttgtagtaaaatgttagggtttcggattttggatttatatttttttattggaaaggatttttttagatttttagaattgtatgtttgttggagattttaaggtaaagttgattagggaagtttttttttagaagtagttggtattttatatgcggatagtttttttaagattgtggattaagattttttttttattatgaaagtattattttttatttttttttttttattttttgttgttttaattttttttttttttttataagaaaatttataggattataatttgtgaatggttttagtaaaggtttatattttagtaaaataagtaaataaataaaaaaaataaggagttgttgagtttttgaattaacgttttaaaattaggaaataattttattggtgttaatgtttttttatgtttttaatgagaattatttagaaattttaaaggaggagtggaaagttatattttgatattttagatattattgttatttgtttttttgtatttattggaaatatttagtagtgattatgttattagttagttaatataataatagtacgtaataatatattattaattagttaataatataattattattaaatataggaaatgtatttgaataatggttgtaaaaggtatattttgtttttaggtatttcgtatgtaagatttggggattatttatgggggtgtgggtaattgcgtgtgtaatgttattggattaaatatgtaaagtggttaggtatggtggtttatgtttgtaattttagtattttgggagattgagatgggaggattgtttgaggttaagagtttaatatagtacgattttaattttattaaaaataaataaataagtaaatatagtaaagtttttttttaattaaatgtggttatgtattttcgtagtatgttagaaaaagattataaaaaagtaagttttttattttgtttaggagttatgtagatttatgggtaaataaatttaattgatttttgttttaatgttagtaggtgatttttttttttaatattacgagtgtttattttgagtattttgaggtttgtttattttgttttttttttttataggtttagaatttgttatttggtttagtttattgttgttttttaaattgtttttttgagagttttttaatattttttatagttaaaagttaaaatagttaataattgaaattattattaattttaaaatcgacgaagataagttggtttttgtttagaaaaggttttagttgggtttttgggtgtttatttttggtggtatttgggtgatagttgtatggaatttgaggttaagttatatattaagggatattttgaattttgtagttaattgaatttttaaggagtttagatgggtagaagttattttttaaattgagatgagaatatttgtggtaataaaaacgtttaatggaatattacgtaattttagattttttttatgtttattttggaggtttgtgtatggtgttgaagaaaattaaatattgtttttatttttttagtgaatttattagtgtagataatttaatttaaaatgcggttgatattgttgtttttttagatattgttataaatatattaaggatattttttaggggaaagaaatagatatgtgtttataggtgtagttagtagttggtttgtaagtattttgaatggtgatggtaagtgatatggtttggttttgtgtttttatttaaattttattttgaattgtaatttttaggtgtggagggaaggatttagtaggaggtaattggattttgggggcggttttttttatgttgtttttgtgatagtgagtgagtttttataagatttgatggttttataagaggttttttttttttggtttttttttttttttttgttattttgtgaagaaggtatttgttttttttttattttttattatgattgtaagttttttgttttttatttattttttgttatgaattgtatttttttggggtttttttagttatgtggaattgtgagttagttatattttttttgtttataaattatttagttttaggtatgtttttataatagtgtgagaatggattaatatagtaagtttggttattttaaatttttttatttttaatgttttttttagtgggtttttaggatattatatgttattaggttaattataaatgaatgtttttataaattaagttattttatagtaagttttggtttttaattattattatgttttgaataaaatttatgattaattggattttaatattattgaattatttttattgtttgaatttcgaattattcgattttgattagtttggtttatggatatatttaagttaaaagagattattaatagttttttttttttttgtggatagtggattttatttatatttttaagtttatattttttaaagtttattataggtttagtgattttatttttttcgtattatttttttgagagttattataatagtttttttgatgtgttgtatttttttaagagttttggtcgggtgcggtggtttatatatgtaattttagtattttgggaggtcgaggtaggtggattgtttgagtttaggagtttaagattagtttgggtaatatggtaaaattttgtttttataaaaaatataaaaattagttgggcgtggtggtatgtatttgtagttttagttatttggggggttgaggtaggaggattatttgagttttgggaggttaaggttgtagtgagacgtgattatgttatagtattttagtttggttgatagagtgaggttttgttttagaaaaaaaaagagttttaaatgtttatatgtagttattttttgtatatttagtgggtttattatagtgggaataataaaaatatgaagaaaaggtaaagaattatttaattacgttgatattgtttattgtgaattttatattgagagtagataagtttattatgatggtgatagaagtaatgttgatgtttaaggttttggttaattttaaaattttgaggttgattaaaaggggagaattgtttaattaaattaaatttgatttaaagttttttttgtagagtgaattgtaatttaatttgggagtatatttttttttttttttttttttttgagaaggagttttattttgttatttaggatggagtgtagtggtaagattttggtttattgtaatttttgttttttggatttaagtgattttttttttttagttttttgggtagttgagattataggtacgtattattatgtttagttaatatttgtatttttagtagagataaggttttattatgttggttaggttggtttcgaatttttgattttaggtgatttattatttcggtttttaaaagtattgggattataggtatgagttattgtatttggtttaaatgaatatatttttgtgataagtagttaagtgttggttaattagagtagttgggtttttagtttatataggttgtaaattgtttagattgtgattaagtaaggtaagttgtgatttgtggttaattaggttgtttttgtatgttattttttttttttgtttgtaaatattatttgattatattgtcgtgtggtgttttttttggtttagggagttgtttaatttatgagttatttttttgtttaaataaattttgttaaatttaatttgatgttttttttttaataatattatttattatgttttattatgtttcgtatttattaattatgttcgtgttatttttgattttggaagtttgttttattttgtttggtgaagtttttttaagtattaaggtaagaagtagtttatttttagattttattcgtttgtgttttatttttagaaaggatttgagtaggttttttttatttatttgtagaaggttttttaaaaggggtagagggcggggttttggtgggaggcggttatgggtgttagggtggcgttgaattaggagtagtaagagttttgtgaggagtgtaaggaagaggaggacgttgagttttatggttttggtttgattgttttgtattttgttgtagtttttaattgggttttttattttgattttgtttttgtattttgttataaaattttatttattttttatttttttttttattattatttaggagtattagtttagaaaaagttgttagggaatttagattttttgtttgggtaatttagtgatttgatgtttatttttttatttattttgtagatattggtagggatatagtggtagagatattaaagtttaggtgagtaagtgaatgtgtgggtgtgtgggtttgtgggtatatgtatgtttatttttgtaagtataggtgagtttgtatttttttatttagttttgtttgtttgtttgtgtttgtatgtatttgtttatgtttgtttgtatttttgtatgtgtttatatgatttttatatgtaaaggggtgtttgaatttatgtaaatgtattggcgtatatttttgtggttgaatttgggggtgtttatgtgtgtatttttgtatgtgtatgagtttttttgtatttatatagttttatatacgaaagtgtatttatatttgtgtgttgtggaggtggtggtagtgtatgtttaaaattgagaggttggttgggtgcggtggtttatatttgtaattttagtacgttgggaagttgaggggggtagattaattgaggttaagagttcgagattattttggtttatatggtaaaattttatttgtattaaaaatataaaaattaatcgggcgtgatggtgggtatttttaattttagttattcgggaggttgaggtaagagaattatttgaatttgggaggtggaggttgtagtgagttaagattatattattgtattttagtttgggtgatatagtaatattttattttaaaaaaaaaaaaaaaaaaaaaaaaaggagaagttgatgaaaataaggaattatttaatttaattaaatttggtttattgtttttgtagtatagtaaattgtaatttagtaatatatgaattaattgtgtgtatttgtgtgtgttggtgtatttgtgttggtgtgttggtggattttttagtttttttttttggaagtttgtagatgttgagtttatttttagtgtttttttttttattcgtttttttgtgatagttataggtggaagtggtcggagaaatagaaggaggagtaagagatgtagaattggtgagttttagaggaagaggtggttagttggaaggagatagaaattgagatttggtaggtatagcgattaggtttttttggtttttgattattttaattagtgttaaggagttttttttttgtttttgattatttttacggtgtaggaaatttttttggttttttttttgtttgattttgtgtttttgttttttttttggagatttttgagttttaggtgtgtgtaaattgagtttagtttgattgatgtttattggatttttatatgtttttatttttattgtgtatttttatttatatattttttgatagggttagtttatttttgtaaaacgtgggtgtgaatgtgtgcgtgtttgtttgttttattttacgtttgatttttgattatgaggtaatattttttttgtaatgttaagtaaattttttgttggatttaggatttgaattcgaagttattttgatttaggaggagtagataaatagttttatttgtaagaggtggaaattgtatttttttgattttgaagaggtggtagtatggatttttttgaattaagggtttcggttttgttgtgttgtgttatttgatattaagattgggtgtttattgtagttttagggtgaagtatcgatggggaggcgtgaagtgttttatatatagtaatttagtttttatatttttagtgaggtattgttgttatttttattttatagatggagatattgaagtaatgatagtttgtaagttttatttaaggttatatagtgggttggggttatattgtttaatgtgatagttatttgttgtatgtggttattaattaagtatttgaaatgtggtttaaatgttatttataatagtaaaaatagggaattaatagatgaatggttaaataaaatgtggtatatatatattattgaatattatttagttataaaaaggaataaaataatgttttttatagtaatatggatataattggaggggattattttaagtgaaataagttaggtatagaaagtgaatattatatgtttttatttataagtgggtgttaaataatgtgtatatatggatatagagagtggtattattaggggaaatttagttagatatcgggtaaaatttatttttaatattttacgtaggtttttttttgttttttttaagtgtcggttagtttgagaaataaagggatagagtataaaagagagaaattttaaagttgggggttcgggggagatattatatgtcggtaggttttatgatgttttttgagtcgtaaaattagaaagtttttattagtgatttttaaaaggggagggagtgtacgaatagggtgtaggttatagagattatatgttttataaggtaataagatataataaggtaaatggaggtagggcgagattataggattataggatcggggtgaaattaaaattgtaatgaagtttcgggtaagtattgttattgataatattttattaggagataaggtttgagagtagataatcggtttgattaaaatttattaggtaggaatttttttatggattttttgttcgattgatttttttattattatgtattgattttttttgtttttttttatagtttttgatttaaagtttgttttttttataaatataggtattgttgtttatttttggtttttatttgtatggaatatttttttttatttttttatttttattatatatgttttttttggtgagatgtgttttttgtaggtagtatatagttgggttatgttttttaaatttatttagttagttttttttttttaagtggaaagtttaatttatttaatttaaggttattattgatatgtgagagtttaattttgttatattattagttggtttttttatgtatgtatatttttttttttttttttttttttttattgtttattattgtagttttgagagataggattagttggatttttagatttgttattattcgaggggttttaggataagtagttattagttatttcgtttagttattaagttgtaattgggggattttattttttttatatgtttttttaattatgtttgaaagttttatttttttgttagggagagatattttagtaaaagtaggggttatgatatattagaattaggagaagggaaaagggtaaatatatataaatattttaattatgtttatttttttttttatgtttatataaaaatatggtgagaaatggaatttttaatttttgagggaatatttattaaatattaggaagttattatgagttattatgggttgtacggaaatttaaagaggtggttattttatattgttggggttattagaaaggaaaggaaagggaaatagaagggaattattaagtagatattgaagttaaagagttataaggcgggattttttattagaaatgtttatagaaggaattttagtatggggtaattttttttaggaaattaagttttagtgtttagtagaagaaatagaatggggtattttataaggatatagttttttttttttaggatgtttagttattaaagaaggaaaaatatttttgtttgtagttaattaatggaaattatttaaaattttttattaaattttttatttaggcgttgatagtatttatttaatggttaaattattatttgttggattaggtttttttaaaattattaagtaggtagttagggtttgtgaagtgtgttaaagaaataattttttgtattttaggttagatattttaatttttgtgtttttaatttttttgttaagtttgttttttttagaattgaagttgtaaaattataaatagttttttaaacggagttttaggtgtagtttatggttaagatttacggtagatttttggatttgttttttagtttatgttttaatgttgatgatattaaagatattttttttgaggaaattttaattgtatgatttttattatgtttttatttagtagaaagaagttagtatagttgttggttaatttttttaatagtatttgggtttttttgttgagagggggtattgagagataggattagttggattttttaggtcgattaagagtttttaagtttagttggggaaggtgattgtatttatttttaaataaaggttttgtaatttagtttatatttgattaattaggtagtaaagagggtttattaaaatattaattaggttaaaagtaggaggtaaagaaatagttaaattatttattatttgagagtatagggagagggataatgattgggatataaattttaggtattggagttaggggtgggtaattttttttgggttttttttttttgtattggagttttgtttttattttattaaattttgttaatgtatatttttttggtttatgtttgttttagtttgagttgagtttttgttcgttgtttattattgttgaatgtcgtttgtcgatgtgttattgatttttatttttttagatttagtatggtgttcgttgtatttttgatttagtaaggtatttattgttgtttttaattaggttaaaggtttattattgtttttttatggttaagtgtttgggtttgttttaatcgagttgaatattagttattgggttttacggtttttttttatgatttatggtttttaatagagttataatatttattgtatggtttagggtttaattttttggaatttatgaggttaagaattttagtttagagaataaaaggtttgttgttattttggaagtggtttgttttatt

SEQ ID NO: 35 - DNA, 8076 bp, Artificial Sequence
  chemically treated genomic DNA (Homo sapiens)
  unsure (3668, 3675, 3690, 4990)
attaataagtagaaaggatatttatattagaaatttatttgtatattattattattaaagattaaaagtagataaaattataaagatggggaaaaaatagagtagaaaaattggaaattttaaaaagtagagcgtttttttttttttaaaggaaggtagttttttattagtaatggaataaagttggatagagaatgattttgacgagttgagagaagtttttagatgattaaattattttgagttataggaggaaatttaaattgaaggtaaagaagttaaaaattttgaaaaaaatttagacgaatgtataattagaataaataatatagagaagtgtttaaaggagttgatggaattgaaagttaaggttttagaattacgtgaataatgtagaagatttaggagtcgatgcgattaattggaagaaagggtattagtgatggaagatgaaatgaatgaaatgaagtgtgaagggaagtttagagaataaagaataaaaagaaataaataaaatttttaagaaatatgggattatgagaaaagattaaatttatatttgattggtgtatttgaaagtgatagggagaatggaattaagttggaatatattttgtaggatattatttaggagaattttttttatttagtaaggtaggttaatttttagatttaggaaatatagagaatgttataaagatatttttcgagaagagtaattttaagatatataattgttagatttattaaagttgaaaggaaggaaaaaatgttaagggtagttagagagaaaggtcgggttatttattaagggatgtttattagattaatagcggatttttcggtagaaattttataagttagaagagagtgggggttaatatttaatatttttaaagaaagaatttttaatttggaattttatatttagttaaattaagttttataagtgaaggagaaataaaattttttatagaaaagtaaatgttgagagattttattattattaggtttgttttaaaagagtttttgaaggaagtattaaatatggaaagaaataattggtattagttattgtaaaaatatgttaaattttaaagattattaagattaggaagaaattgaattaattaacgagtaaaataattagttaatattataatgataggattaaatttatatataataatattaattttaaatgtaaatggattaaatgttttaattaaaagatatagattggtaaatgggataaagagttaagatttattattgtgttgtattcgggaaatttattttatatgtagagatatatataggtttaaaataaaaggagggaggaagatttattaagtaaatggaaaataaaaaaaggtaggggttgtaattttagtttttgataaaatagattttaaattagtaaagattaaaagagataaagaaggttattatataatggtaaagggattaatttaataagaagagttaattattttaagtatatatgtatttaaaataggagtatttagatttataaagtaagttttgagtgatttataaagagatttagatttttatatattaataatgggagattttaatattttattgttaatattagatagattaacgagatagaaagttaataaggatatttaggaattgaatttagttttgtattaagtggatttagtagatatttatagaattttttattttaaattaatagaatatatatgttttttagtattatattatatttattttaaaattgattatatagttggaagtaaagttttttttagtaaatgtaaaagaatagaaattatggtaaattgttttttagattatagtgtaattaaattagaattcgggattaagaaatttatttaaaatcgtttaattatatggaaattgaataatttgtttttgaatgattattgggtatataacgaaatgaaggtagaaataaagatgttttttgaaattaacgagaataaagatataatatattagaatttttgggatatatttaaagtagtttgtagagggaaatttatagtattaaatgttaaaagaggaagtaggaaagatttaaaattgatattttaatattataattaaaagaattagaaaagtaagagtaaatatatttaaaagttagtagaaggtaagaaataattaaaattagagtagaattgaaggaaatagagatataaaatattttttaaaaattaatgaatttaggaggtagttttttgaaaggattaataaaatcgatagatcgttagtaagattaataaagaaaaaaagagagaagaattaaatagacgtaatagtaaatgataaaggggatattattatcgattttatagaaatgtaaattattattagagaatattataaatatttttacgtaaataaattagaaaatttagaagaaatggataaattttttgatatatatatttttttaagattaaattaggaagaagttgaatttttgaatagattaataataggagttgaaattgtggtaataattaatagtttattaattaaaaagagtttaggattagatggatttatagtcgaattttattagaggtataaggagaaattggtattattttttttgaaattattttaattaatagaaaaagagggaattttttttaatttattttatagattttttaattgtggtgttagggtgttaattttagattttttttgtttttttttgtgggtatatagtgttataaattttcgtttatatattgttttgaatgtgttttagagattttggtatgttgtgtttttgtttttattggttttaaagaatatttttatttttgtttttatttcgttatgtatttagtagttatttaggagtaggttgtttagttttcgtgtatttgagtggttttgggtgagttttttaattttgagttttagtttgattatattgtggtttgagagatagtttgttataatttttgtttttttatatttagtgaggagtgtttatttttaattatgtggttaattttggaatgggtgtggtgtggtgttgaaaagtatgtatattttgttgatttggggtggagagttttgtagatgtttattaagtttatttggagtatagttgagtttaatttttggatatttttgttaattttttggttttttgattcgtttaacgttggtagtggggtattaaagttttttattattattgtgtgggagtttaagtttttttgtagtttattaaggatttgttttatgaatttgggtgtttttgtattgggtgtatgtatatttaggatagttagttttttttgttgaattgatttttttattattatgtaatggttttttttgttttttttgatttttgttggtttaaagtttgttttattagagattaggattgtaatttttgttttttttattttttatttgtttggtagatttttttttatttttttattttgagtttatgtgtgtttttttacgtgagatgggttttttgaatatagtatattgatgggttttgattttttatttaatttgttagtttgtgttttttaattggagtatttagtttatttatatttaaggttaatattgttatgtgtgaatttggggggatcgagttcgaattncgaaatntagtttatagttttnttaaagaaatttttttttttttttattgtatttataattgtggttttgtttataattttttttgttttttgtgtattattatattatatttgaaaatgagaaattaaaaataatagaaagtagttatgtttggaggtgattggggggtcgagaagttttagttttttaaatttttagtattaaattttttttttagttatattgagcgttttatttttgtagtgatggagaagggagattttttatttttttttatgagtatttttggtgttgttttttttagagataaataaggggttttatttaatgtgaagtttgttttatgaatagaataaatgtggtgtatatttagaataattaatgtttggaagtttgttttattttgttaaaattgtttttaaggtagttttggtgtaagagataatatattacgatgggtattagaagattttagtttaaattttagttttgttagttatgagttgtgtggtattaataggtgttttgtttttttagggtttttttttttttatttgaaaaataaaaaataataatttttgtttttaggaattttttttagggggtttaatggtaaaggtgtttatatttgttaaggtaatttatttgatatatgtttggttatttaagatatatgagttatgttagttattttatgtttaggttgttgtatttttagtaggttatattaaatatttgaaaggattttattataaagaataaagttttttaatttttgatatagtattgatatattttttaaatatataaggtatagaatatggttatttttgttaaattatatatttttaattggttattaatttaagaatttagaattttgagtaattgtttttgtattagattatttattttagtgtttttaattatgatggtgtattagaattatttgggttaatatttgttttttattattaatatttaggttttaattaagtatagtgaaattggaatgtatagagtggataatggaacgaaggagaataagattaaaggatattttatttttatttgtattagtgggttaaagtttttttagaaggagtatatagtggatttaggtgattggttaatttatttattaaagaggtatatatcgaattagtatggagtgttataaaaggtttggagtgtaagtttatggttgttttaataagaagagaaggttttaatggatttttttgtggtttttgtgttttgttttttatgtttgtttttttttttattttggagatagagttttgggagaggaaaatttttnttagaaaatattttttttttagtgattggaaatattttatagataggtattaaggatattagtaaatttttaattaatgtaagtatgtttttttagtggtttgtaaaaggtaagtaaatttatttgtattttttaaataaagtgtatttttagaggtatatgttataagaggtaatggtaaagtaaaatattttgaaaggtttttgttgttttttttagtttgttagtgttagaaatagtggaatgaaattatgtattttgtgagtagagaaagatttgggtttttgtatgttagatttaaaataataagtgttaatagtttgaaaagttgtgttttttttttattttataattatttgttataatttttggttgaaggtaaatggtaaggtattgtgggatttggttagtagtttataaagtaattgggttttttttttttttttaggtggatcggtaggttgagaaataatagatatataagatagtgaaagttgggtttaggggggttatcgttttttggttttatggtgttaagaatgtattggatatattagtatttattattaagtttagtgagggtaggggtaggttagtgagggatttagggttatttgattatgaggtgagatggttatatggggatgaagtaattttttaatataatatttgtatgtagaagtatagtatatttgtatgtagaagtatagtatacggagataagaatttataatatagtgtgtgcgttagtaatttttaatagagttttaaaatagaaatataatttttttataatttatgattagtaagatattaattagtagtaataattgtaataaaagttggttataaataatttatggaaataggatgtgaagttagataattagttagattagaaatttttagaagggagtatgttttaattttaaagaggtttagaagagttatggtaagatgagggtatttatagttttattttatttatatggataggtgttttttatgcgtttatttataggttttttataaaggtcgtattttatttttagagttatgaatatttgtttttttgggataggaattttggtgatgtgaaatttttttgattgtacgtttatttataggttttttgtagggggaagtatattacgcgttgttggtttattttggtagtttagtttggtattgtttttatataattttgtatgtaattttgtatttataataatcgggagtattttattttttatttcgtagtaatagttttagggggggtttttttatagtaaggaatatgtttgttattagagattttattaaataagttttttattatattagttatgtgttttatttagaatagttatgaaaattaaatttttttgaagaattaatttatgtttgttgtaaaggaaataattgtgggtttaggattagtaaaagtagataagtggtagaaaagaagttatagatttttatttttagatttataaagtattgttttaattatattatagttataatatataaattttaaaatgattttagtatttagtaatggtaggaagaaggttagaagatgtataagtattagggtttttttttaagtgaaagatggtttagtagtgttaatatgatatgtgaatatttttcgttgtgtaataattattatatatagagagtaaagggttgtaattagtatattaagttttataagtatgatggtatgattagattaagagaatgacgttgtagttatgaagattatttttattagattgatggtagggggtagggtaaggttggtaagattagttaggagttattatatggttattagggagagaagtgtttgaaggttttgtgttagtagtatggtttggttgtgaattcgtttgtagtttgagtttgtaaggtagaataatagggatgaggttagtttgtgggtagttattagggaagttgtattggtaaaattttagggggtttgaatgagaaaagttatgataataagtgttatgtggtttatggaaaagtaatgagtgattttagattagtttggtatagataaaaggagtttgttatgattattttttaaaaggatagtaagaaggaggaataagttataaattttgttagggggttaagaattaaggtgatttgtataattttatagttatttaattttaggagtattgttgtgaggattattgatttggtaattgcggtttttatgtgggtttttgggagttttaggtggagtttatagagagatatttttagtataaatgttatgatgtatgttaattataaaaggttattaaattaggaaattgttagtttttgaagttgggtattggttttaaggtagattcgaaagtgttgataaattttttaagtattagtgtttgaataagcggagttttaaattttggtttgttgtatattagttgtgagatattgaaaatgaatttgttattttttgagtttagttttttttttttttttttttttttttgagatagagttttattttgtagtttaggttggagtgtagtggtataattttggtttattgtaatttttattttttaggtttttatttaagaaatttttttgttttagttttttaagtagttagtattataggtatgtattattatgtttagttaatttttgtatttttagtagagacgtggtattattttgttggttaggttggttttgaatttttgattttgtgatttatttgttttggttttttaaagtgttgggattataggtaggagttattatatttggtcgtttgtttaaaatagagtaaatagatttgttgaatatgttgatgtgagtattaattgtaatttgtatagtaattgtttgattattgttttgaatattataggttatttgagtggtaagtataattattattatgtttttatttaaaatttagaaatatttgaagtttgtgtggttgaataaaagtatataaatataatgaaaatattatgttaaattaggtttagtaaatggataaaatagtaatttcgtttgttgttatttttgtttatttttttagt

SEQ ID NO: 36 - DNA, 8076 bp, Artificial Sequence
  chemically treated genomic DNA (Homo sapiens)
  unsure (3087, 4387, 4402, 4409)
gttaggaaagtagatagagataatagtaaacgaagttattattttgtttatttgttaagtttgatttagtatgatatttttattgtatttgtatgtttttatttagttatataggttttaaatatttttgaattttaaatagaaatatgatgatgattatatttgttatttagatggtttgtgatgtttaaggtaatggttagataattgttatgtagattataattaatatttatattaatatatttagtaggtttatttattttattttaaataaacggttaggtgtggtggtttttgtttgtaattttaatattttgggaggttaaggtaggtggattataaggttaggagtttaagattagtttggttaataaggtgatattacgtttttattaaaaatataaaaattagttgagtatggtggtgtatgtttgtaatgttagttatttgggggattgaggtaggagaattttttgaatggggatttgggagatggaggttgtagtgagttaagattgtattattgtattttagtttgagttatagagtaagattttgttttaaaaaaaaaaaaaaaaaaaaaaaaaattgagtttagagaatgataaatttatttttagtgttttatagttaatgtatagtagattaaaatttgaaatttcgtttatttaaatattgatgtttgagaaatttattagtattttcgagtttattttaagattaatatttagttttaagaattaataattttttggtttaatagttttttatgattagtatgtattatagtatttatattaaaaatatttttttatggattttatttaggatttttaaaagtttatatagaggtcgtaattgttaggttaatagtttttatagtagtatttttaaaattagatggttataggattatataaattattttaatttttaattttttaatagagtttatagtttattttttttttttattatttttttgagaaataattataataagttttttttgtttgtgttaaattgatttaaaattatttattatttttttataagttatatggtatttgttattatagttttttttatttaaattttttgaagttttattagtgtaatttttttaataattgtttatagattaattttatttttattattttgttttgtaaatttaaattataaacgagtttatagttaaattatattattaatataaggtttttaaatatttttttttttgatagttatgtgatgatttttagttagttttgttaattttgttttgttttttattattaatttagtaggagtagtttttataattatagcgttatttttttgatttaattatattattatgtttataagatttaatatattaattgtagttttttattttttgtatatggtaattattatataacgaggggtgtttatatattatattaatattgttaaattattttttatttgagaaaaaattttaatatttatatattttttgattttttttttattattattaaatgttaaggttattttggggtttatatattgtagttatagtataattaaaatagtattttgtggatttaaaaatggaagtttataattttttttttattatttatttgtttttgttggttttgaatttatagttattttttttataataggtataaattaattttttagagaagtttaatttttatggttattttgaataaaatatatggttaatatagtagaggatttatttaataaaatttttaataataaatatgttttttattgtagggagattttttttgaaattattgttacggaataaaagatgaaatgttttcgattattgtaaatataaaattgtatgtaggattgtgtaaggatagtgttaggttggattgttagaatgagttaatagcgcgtgatgtgtttttttttgtagagagtttatgaatggacgtgtagttagagaggttttatattattaagatttttattttagaaaagtagatgtttatagttttgggaatggaatgcgatttttgtggagaatttataaatggacgtatggggggtatttgtttatatggataagatagggttataaatgtttttattttgttatggtttttttaggtttttttagggttaaggtatatttttttttgagaatttttggtttaattggttgtttagttttatattttatttttatggattgtttgtaattagtttttgttgtaattgttattgttgattaatattttgttaattataggttatggaaagattgtgtttttgttttaaggttttgttagaaattattgacgtatatattatattgtaaatttttattttcgtatattgtatttttatatataaatgtattgtatttttatatataaatgttatgttaaagaattattttatttttatgtgattattttattttataattaaatgattttaaattttttattaatttatttttgtttttattaaatttaataataaatgttggtatatttagtgtatttttggtattatgggattagaaggcggtgatttttttggatttagtttttattattttgtgtgtttattattttttaatttgtcgatttatttgggaaaaaagagagagtttagttgttttgtgggttgttgattagattttataatattttattatttatttttagttaaaaattatagtaaatggttatgaaatgaagaaggaatatagttttttaaattattgatatttgttattttgaatttaatatgtaaagatttaaatttttttttatttataaaatatatggttttattttattatttttgatattgatagattggaaaaggtaataaaagttttttaaagtattttattttattattattttttgtaatatgtatttttagggatatattttatttaaaaaatataggtgaatttatttattttttgtaagttattgaaggagtatatttatattggttaaggatttgttgatgtttttaatatttatttgtaggatatttttaattattgggagaggagtgttttttggnaggagttttttttttttagagttttgtttttagagtgaaaggagaagtaaatatgagagatagagtataaggattataagagaatttattgaagttttttttttttgttaagataattatgagtttgtattttaagttttttataatattttatgttaattcggtgtgtgtttttttgatggataaattgattaattatttaggtttattatatgttttttttgaaaggattttgatttattgatatagataaaaataaaatgttttttggttttgttttttttcgttttattgtttattttgtatattttagttttattgtatttggttggagtttaggtattggtaataaaaaataaatgttaatttagatggttttaatgtattattataattgagagtattgaagtaaataatttgatgtaaaagtaattatttaaaattttgaatttttagattaataattagttgggaatatatgatttaatagaaatggttatattttatgttttgtatatttaaaaagtatgttaatgttatattaaagattaggagattttgttttttataatgaaatttttttaaatatttaatatagtttattaaaaatatagtagtttaaatatgaaatagttaatataatttatatattttaaataattaaatatatattaagtaaattattttagtagatataaatatttttattattaaattttttaaaaaaaatttttgaaggtaggaattgttattttttattttttaaatgggaaaagggagattttgggagaataggatatttgttggtgttatatagtttatagttggtagaattgggatttgagttgaggttttttgatgtttatcgtggtgtattattttttatattagagttgttttgagaataattttagtaaaataaaataaatttttaaatattagttattttgaatatatattatatttattttgtttataaaataggttttatattaaatagaattttttatttgtttttaagggaaatagtattagagatgtttatgagaagaaataagggattttttttttttattattgtagaagtgaaacgtttagtgtaattgagggaaaaatttggtgttaagggtttgagaaattagggtttttcgattttttagttatttttagatatggttgttttttattgtttttggttttttatttttagatatgatgtaataatgtatagaaagtaaaggaaattatggatagaattatagttgtggatgtaataaaagagggagggggtttttttggngaggttataaattgnatttcgnaattcgagttcggtttttttaaatttatatataataatattaattttaaatgtaaatgggttaaatgttttaattaaaagatatagattggtaagttggataaagagttaagatttattagtatgttgtatttaggaaatttattttacgtggagagatatatataggtttaaaataaagggatggaggaagatttattaagtaaatggaaaataaaaaaagtaggggttgtaattttagtttttgataaaatagattttaaattaataaagattaaaagagataaagaaggttattatataatggtgaagggattaatttaataagaagagttaattgttttgaatatatatgtatttaatataggagtatttagatttatgaagtaagtttttagtgagttataaagagatttagatttttatataataataatgggagattttaatgttttattgttaacgttagacggattaagaggttagaaagttaataaggatatttaggaattgaatttaattatgttttaagtggatttaatagatatttatagaattttttattttaaattaatagaatatatatgttttttagtattatattatatttattttaaaattgattatataattggaagtaagtattttttattaaatgtaaaagaatagaaattataataaattgttttttagattatagtataattaaattagaatttaggattaagaaatttatttaaaattatttaaatatacggaaattgaataatttgtttttgaatgattattgggtatataacgaaatgaaggtagaaataaaggtgttttttgaaattaatgagaataaagatataatatattagaatttttgggatatatttaaggtagtatgtagacggaaatttatagtattatatgtttataagagaaagtaggaaagatttaaaattgatattttaatattataattaaaagatttataaaatgagttagggaggattttttttttttttattgattggaatagttttagaaggaatggtattagtttttttttgtatttttggtagaattcggttgtgaatttatttggttttggattttttttggttggtaagttattgattattgttataattttagtttttgttattggtttatttagagatttaatttttttttggtttagttttgggagagtgtatgtgttaaggaatttatttattttttttagattttttagtttatttgcgtagaggtgtttgtagtattttttgatggtagtttgtatttttgtgggatcggtggtgatattttttttattatttgttattgcgtttatttgatttttttttttttttttttttattagttttgttagcggtttatcgattttgttgatttttttaaaaaattattttttggatttattaatttttgaagggtgttttgtgtttttattttttttagttttgttttgattttagttattttttgttttttgttagtttttgaatgtgtttgtttttgtttttttagtttttttaattgtgatgttagggtgttaattttggattttttttgtttttttttttggtatttagtgttataaatttttttttatagattgttttgaatgtgttttagagattttggtatgttgtgtttttgttttcgttggttttaaagaatatttttatttttgtttttatttcgttatgtatttagtagttatttaggagtaggttgtttagtttttatgtagttgagcggttttgagtgagttttttaatttcgagttttagtttgattgtattgtggtttgagagatagtttgttataatttttgtttttttatatttgttgaggagagttttatttttaattatgtggttaattttggaataggtgtggtgtggtgttgaaaagtatgtatattttgttgatttggggtggagagttttgtagatgtttattaggtttatttggtgtagagttgagtttaatttttgggtatttttgttgattttttgtttcgttgatttgtttaatgttgatagtggggtgttaaagttttttattattaatgtgtgggagtttaagtttttttgtaggttatttaggatttgttttatgaatttggatgtttttgttttgggtgtatatatatttaggatagttagttttttttgttgaattgatttttttattattatgtaatggttttttttgttttttttgatttttgttggtttaaagtttgttttattagagattaggattgtaatttttgtttttttttgttttttatttgtttggtagatttttttttttttttttattttgagtttatgtgtgtttttgtatgtgagatgggtttttcgaatatagtatagtgatgggttttgattttttattttatttgttagtttgtgttttttaattggagtatttagtttatttatatttaaagttaatattgttatgtgtgaatttgattttgttattatgatgttagttggttattttgttcgttagttgatttaatttttttttagttttgatgatttttaaaatttggtatgtttttgtagtggttggtattagttgtttttttttatgtttagtgttttttttaggagtttttttggggtaggtttgatggtgataaaattttttagtatttgtttttttgtaaaggattttattttttttttatttatgaagtttagtttggttggatatgaaattttaggttgaaaattttttttttaagaatgttgaatattggtttttatttttttttagtttgtagagtttttgtcgagagattcgttgttagtttgatgggtattttttagtgggtaattcgatttttttttttggttgtttttaatattttttttttttttttaattttggtgaatttgataattatgtgttttggagttgtttttttcgaggagtatttttgtggtattttttgtattttttgaatttgaaggttggtttgttttgttagatgggggaagtttttttggataatattttgtagagtgtattttaatttggttttattttttttgttatttttaggtatattaattagatgtagatttggtttttttttatagttttatattttttggaagttttgtttgtttttttttattttttgttttttaaatttttttttatattttattttatttattttattttttattattgatatttttttttttagttgatcgtatcggtttttgagttttttgtattatttacgtagttttggagttttggtttttagttttattagtttttttaagtatttttttgtattgtttattttagttatatattcgtttaaattttttttaaagtttttaatttttttgtttttagtttgaatttttttttgtagtttagagtagtttgattatttgaagattttttttaattcgttaaagttattttttgtttagttttgttttattgttggtgaggaattatttttttttggaggaggagaagcgttttgttttttagagtttttaatttttttgttttgttttttttttatttttgtggttttatttatttttggtttttgatgatggtgatgtatagatgggtttttggtgtggatgttttttttgtttgttagt

SEQ ID NO: 37 - DNA, 8136 bp, Artificial Sequence
  chemically treated genomic DNA (Homo sapiens)
aatatatatattatttgaagaaaattataaaattttgatgaaagaaaataaagatataaataaatatataaatattttatgtttatggatatgaagatcgttgttagtttttttgatttgatttatagattaatataataagaattaaattttaggaaagttttattatttttattattttttatttttagatgttaataatttgattgtaaagtttatgtggagaggttaaaaaatttagaatagttaacgttaaggagaataaagttaaatgattgattttatttaatttaattttaagatttattatgaagttaattaagatagtgtgtaattggtgaaaaaagttaaatagattaatgtaagtgagtaaagagtttgaagtagattattagaaatatagttaattgatttttgaaaaaaaaggaaagataatttaatgggggaaaaatggtttttttaacgaagattaatggagtaattggaggtttatatacggaaaaatgaatttggaaatagattttatatttttaatgaaagttaattaaaaatatattatagatttaagtcgggtgtagtggtttatgtttagtatttttagtattttgggaggttgaggtaggtagattataggttaggagttcgagattattttgggttaatacggtgaaatttttatttttattaaaaatataaaaaattagttgggtatggtggtacgtatttgtagttttaggttgttaagaggttgaggtaggagaatcgtttgaatttaggaggtagaggttgaagtgagtcgagttgagagttattgtattttagtttaggtgatagagtgagatttagttttaggaaaaaaaaaaaaaaaaaaaatatatatatatatatatatatatatgtgtatatatatatatatgtgtatatatatatatatatatatatatatatatacgtgtgtgtatatatatatatatatatatatattagatttaaatataaaatgtaaaattatgaatttttgatagtataagataggagaaaataaagatgattttgattagtaatggtttttaaaatattataatgaaggtataatttatgaaataaagaatgattaagttggattttattaaaatttaaatttttattttgtaaaagatattattaagggaatgagatgaaaagatagagattgggagaaatatttttaaaagatatatttgataaacgatttttttttaaaaatttttaaaattttataattagaaattagatattttgatttaaaaaatgggtaatagatttgaatagatattttatttaagaagaaatatagatggtaaataaatatatgaaaaatgtttattattaaacgttattacggatttgtaaattaaaattttaatgagatataattatatatttatataatggttaaaatttaaaatattgataaaattaaatgttgataaggatgtgtagtaatgagaattaagttattgttggtggaaatgtaaaatgataaagatattttaggagatagatgggtagtgtttaaaaaaattaaaatatgtttattatattatttggtagttgtgttttttggtatttgttaaataagttgaaaatatatttttatataaaaatttgtatatggatatttatagtagttttatttattattgttaaaaattagaaattattaagatgttttttaatagataaatgaatagataacgtgataaatttatataatgaatgttatttagtgttaataaggaatgaattattaagttatgaaaagatatgtagaaattttatatatatgagtaagttaaattttaaaaggttatatattgtatgattttaatcgtattatattttggaaaaggtaaaattatgtttatattgtaaagattatttgttgttagggtttgtaaggaagggagagagaatacgtaaagtatagaggtttttagggtagtaaagttattttatgtgatattataatggtatatgttattatgtattagttaaattttatagaatgtataatataaagaatgaattttatataaattatgagttttggttgatgatgatgcgttaatgttggtttattgattgtaattaatgagagtttttgattgtgagagagattgtgtgtgggtgtagggaaagaggtatgtggtaattatatattttttatttagtgttgttagaaattttaaattgttttaaaagtttattttaatttattattttagttaagttgaggtttgtattatttagtgattgtggagggtttaatgttgatatttttttgattatttggattgagatgtgaattttatgagatgggatgtgatatgttattgaattgggagttgaaaaattgggattttaagaaaagttttggttgggcgttgtggtttatgtttgtaattttagtattttgggagatttaggtgggtggattataaggtcgggagattaagattattttgtttaatatggtgaaattttgtttgtattaaaaatataaaaaaattagttgggcgtggtggtgggtatttgtagttttagttatttgggaggttgaggtaggagaatggtatgaatttaggagttggaaattgtagtgagtcgagatcgtattattgtattttagtttgggtgatagagcgagattttgtttaaaaaaaaaaaaagaaaagaaaaagttttatattgaggtattgtgattgtgatattttgttttattgagttaataattgtttattttttaaaaaaaaaaaagtaaagtttagagtagttgattttagatattttttttatttatatattatttataattttttttttttgtaaattgaaaggtttaggaaggagtcgtagtttagtaggagagaggaggagttgagttgggatttttattttttgaggaatgaaatgattattataaagatagtaatcgagtttattttatttaaaataaggtagtatatttttgttagagtttagagttttatgagttagggattaagttattgtttttttttgttttgtataaaggtttttttaaggtttttgatttatttaagtattaaatgttataaaattaaatttttttgattttttaatttagttaattggggttgtaattattaatgaaattaatgtttattttgaaaataatttattagattgaattacgaaattttgaattattgtatattattagtaaatattggtggatttaattgaattgaatgttttgtttgaaatgaaatttttgagatgtagggtttatgggttttagttttagttttagtattagtagatagtatgtttttggttaagatattgaatttttaaggtttagtttttttatttcggaaatgggttaattttattgtaagtagaggtaattgagagatttaaaagggatatgaggtgtaataattttttgtaaattgttagaatttttgttaaaaatgattagtaaagttttgtgtaattgtgttttgatataattttattttttttaataaaagaaatggaaataattttattagggaatttagaataaatatgatgatatttttaaagaaaatggttttgtataagtattgatattaatgatttagtaaagtgtatttttttagttgtatttagatttttaatttagtatgttagtttttgttaaggtttatatattgtggtggttttgtgttgtgggtttatttagtgatttttttattttttattttttattgtatttataattgtggttttgtttataattttttttgttttttgtgtattattatattatatttgaaaatgagaaattaaaaataatagaaagtagttatgtttggaggtgattggggggtcgagaagttttagttttttaaatttttagtattaaattttttttttagttatattgagcgttttatttttgtagtgatggagaagggagattttttatttttttttatgagtatttttggtgttgttttttttagagataaataaggggttttatttaatgtgaagtttgttttatgaatagaataaatgtggtgtatatttagaataattaatgtttggaagtttgttttattttgttaaaattgtttttaaggtagttttggtgtaagagataatatattacgatgggtattagaagattttagtttaaattttagttttgttagttatgagttgtgtggtattaataggtgttttgtttttttagggtttttttttttttatttgaaaaataaaaaataataatttttgtttttaggaattttttttagggggtttaatggtaaaggtgtttatatttgttaaggtaatttatttgatatatgtttggttatttaagatatatgagttatgttagttattttatgtttaggttgttgtatttttagtaggttatattaaatatttgaaaggattttattataaagaataaagttttttaatttttgatatagtattgatatattttttaaatatataaggtatagaatatggttatttttgttaaattatatatttttaattggttattaatttaagaatttagaattttgagtaattgtttttgtattagattatttattttagtgtttttaattatgatggtgtattagaattatttgggttaatatttgttttttattattaatatttaggttttaattaagtatagtgaaattggaatgtatagagtggataatggaacgaaggagaataagattaaaggatattttatttttatttgtattagtgggttaaagtttttttagaaggagtatatagtggatttaggtgattggttaatttatttattaaagaggtatatatcgaattagtatggagtgttataaaaggtttggagtgtaagtttatggttgttttaataagaagagaaggttttaatggatttttttgtggtttttgtgttttgttttttatgtttgtttttttttttattttggagatagagttttgggagaggaaaatttttttttggttttattttttttttagtgattggaaatattttatagataggtattaaggatattagtaaatttttaattaatgtaagtatgtttttttagtggtttgtaaaaggtaagtaaatttatttgtattttttaaataaagtgtatttttagaggtatatgttataagaggtaatggtaaagtaaaatattttgaaaggtttttgttgttttttttagtttgttagtgttagaaatagtggaatgaaattatgtattttgtgagtagagaaagatttgggtttttgtatgttagatttaaaataataagtgttaatagtttgaaaagttgtgttttttttttattttataattatttgttataatttttggttgaaggtaaatggtaaggtattgtgggatttggttagtagtttataaagtaattgggttttttttttttttttaggtggatcggtaggttgagaaataatagatatataagatagtgaaagttgggtttaggggggttatcgttttttggttttatggtgttaagaatgtattggatatattagtatttattattaagtttagtgagggtaggggtaggttagtgagggatttagggttatttgattatgaggtgagatggttatatggggatgaagtaattttttaatataatatttgtatgtagaagtatagtatatttgtatgtagaagtatagtatacggagataagaatttataatatagtgtgtgcgttagtaatttttaatagagttttaaaatagaaatataatttttttataatttatgattagtaagatattaattagtagtaataattgtaataaaagttggttataaataatttatggaaataggatgtgaagttagataattagttagattagaaatttttagaagggagtatgttttaattttaaagaggtttagaagagttatggtaagatgagggtatttatagttttattttatttatatggataggtgttttttatgcgtttatttataggttttttataaaggtcgtattttatttttagagttatgaatatttgtttttttgggataggaattttggtgatgtgaaatttttttgattgtacgtttatttataggttttttgtagggggaagtatattacgcgttgttggtttattttggtagtttagtttggtattgtttttatataattttgtatgtaattttgtatttataataatcgggagtattttattttttatttcgtagtaatagttttagggggggtttttttatagtaaggaatatgtttgttattagagattttattaaataagttttttattatattagttatgtgttttatttagaatagttatgaaaattaaatttttttgaagaattaatttatgtttgttgtaaaggaaataattgtgggtttaggattagtaaaagtagataagtggtagaaaagaagttatagatttttatttttagatttataaagtattgttttaattatattatagttataatatataaattttaaaatgattttagtatttagtaatggtaggaagaaggttagaagatgtataagtattagggtttttttttaagtgaaagatggtttagtagtgttaatatgatatgtgaatatttttcgttgtgtaataattattatatatagagagtaaagggttgtaattagtatattaagttttataagtatgatggtatgattagattaagagaatgacgttgtagttatgaagattatttttattagattgatggtagggggtagggtaaggttggtaagattagttaggagttattatatggttattagggagagaagtgtttgaaggttttgtgttagtagtatggtttggttgtgaattcgtttgtagtttgagtttgtaaggtagaataatagggatgaggttagtttgtgggtagttattagggaagttgtattggtaaaattttagggggtttgaatgagaaaagttacgataataagtgttatgtggtttatggaaaagtaatgagtgattttagattagtttggtatagataaaaggagtttgttatgattattttttaaaaggatagtaagaaggaggaataagttataaattttgttagggggttaagaattaaggtgatttgtataattttatagttatttaattttaggagtattgttgtgaggattattgatttggtaattgcggtttttatgtgggtttttgggagttttaggtggagtttatagagagatatttttagtataaatgttatgatgtatgttaattataaaaggttattaaattaggaaattgttagtttttgaagttgggtattggttttaaggtagattcgaaagtgttgataaattttttaagtattagtgtttgaataagcggagttttaaattttggtttgttgtatattagttgtgagatattgaaaatgaatttgttattttttgagtttagtttttttttttttttttttttttttgagatagagttttattttgtagtttaggttggagtgtagtggtataattttggtttattgtaatttttattttttaggtttttatttaagaaatttttttgttttagttttttaagtagttagtattataggtatgtattattatgtttagttaatttttgtatttttagtagagacgtggtattattttgttggttaggttggttttgaatttttgattttgtgatttatttgttttggttttttaaagtgttgggattataggtaggagttattatatttggtcgtttgtttaaaatagagtaaatagatttgttgaatatgttgatgtgagtattaattgtaatttgtatagtaattgtttgattattgttttgaatattataggttatttgagtggtaagtataattattattatgtttttatttaaaatttagaaatatttgaagtttgtgtggttgaataaaagtatataaatataatgaaaatattatgttaaattaggtttagtaaatggataaaatagtaatttcgtttgttgttatttttgtttatttttttagt

SEQ ID NO: 38 - DNA, 8136 bp, Artificial Sequence
  chemically treated genomic DNA (Homo sapiens)
gttaggaaagtagatagagataatagtaaacgaagttattattttgtttatttgttaagtttgatttagtatgatatttttattgtatttgtatgtttttatttagttatataggttttaaatatttttgaattttaaatagaaatatgatgatgattatatttgttatttagatggtttgtgatgtttaaggtaatggttagataattgttatgtagattataattaatatttatattaatatatttagtaggtttatttattttattttaaataaacggttaggtgtggtggtttttgtttgtaattttaatattttgggaggttaaggtaggtggattataaggttaggagtttaagattagtttggttaataaggtgatattacgtttttattaaaaatataaaaattagttgagtatggtggtgtatgtttgtaatgttagttatttgggggattgaggtaggagaattttttgaatggggatttgggagatggaggttgtagtgagttaagattgtattattgtattttagtttgagttatagagtaagattttgttttaaaaaaaaaaaaaaaaaaaaaaaaattgagtttagagaatgataaatttatttttagtgttttatagttaatgtatagtagattaaaatttgaaatttcgtttatttaaatattgatgtttgagaaatttattagtattttcgagtttattttaagattaatatttagttttaagaattaataattttttggtttaatagttttttatgattagtatgtattatagtatttatattaaaaatatttttttatggattttatttaggatttttaaaagtttatatagaggtcgtaattgttaggttaatagtttttatagtagtatttttaaaattagatggttataggattatataaattattttaatttttaattttttaatagagtttatagtttattttttttttttattatttttttgagaaataattataataagttttttttgtttgtgttaaattgatttaaaattatttattatttttttataagttatatggtatttgttatcgtagttttttttatttaaattttttgaagttttattagtgtaatttttttaataattgtttatagattaattttatttttattattttgttttgtaaatttaaattataaacgagtttatagttaaattatattattaatataaggtttttaaatatttttttttttgatagttatgtgatgatttttagttagttttgttaattttgttttgttttttattattaatttagtaggagtagtttttataattatagcgttatttttttgatttaattatattattatgtttataagatttaatatattaattgtagttttttattttttgtatatggtaattattatataacgaggggtgtttatatattatattaatattgttaaattattttttatttgagaaaaaattttaatatttatatattttttgattttttttttattattattaaatgttaaggttattttggggtttatatattgtagttatagtataattaaaatagtattttgtggatttaaaaatggaagtttataattttttttttattatttatttgtttttgttggttttgaatttatagttattttttttataataggtataaattaattttttagagaagtttaatttttatggttattttgaataaaatatatggttaatatagtagaggatttatttaataaaatttttaataataaatatgttttttattgtagggagattttttttgaaattattgttacggaataaaagatgaaatgttttcgattattgtaaatataaaattgtatgtaggattgtgtaaggatagtgttaggttggattgttagaatgagttaatagcgcgtgatgtgtttttttttgtagagagtttatgaatggacgtgtagttagagaggttttatattattaagatttttattttagaaaagtagatgtttatagttttgggaatggaatgcgatttttgtggagaatttataaatggacgtatggggggtatttgtttatatggataagatagggttataaatgtttttattttgttatggtttttttaggtttttttagggttaaggtatatttttttttgagaatttttggtttaattggttgtttagttttatattttatttttatggattgtttgtaattagtttttgttgtaattgttattgttgattaatattttgttaattataggttatggaaagattgtgtttttgttttaaggttttgttagaaattattgacgtatatattatattgtaaatttttattttcgtatattgtatttttatatataaatgtattgtatttttatatataaatgttatgttaaagaattattttatttttatgtgattattttattttataattaaatgattttaaattttttattaatttatttttgtttttattaaatttaataataaatgttggtatatttagtgtatttttggtattatgggattagaaggcggtgatttttttggatttagtttttattattttgtgtgtttattattttttaatttgtcgatttatttgggaaaaaagagagagtttagttgttttgtgggttgttgattagattttataatattttattatttatttttagttaaaaattatagtaaatggttatgaaatgaagaaggaatatagttttttaaattattgatatttgttattttgaatttaatatgtaaagatttaaatttttttttatttataaaatatatggttttattttattatttttgatattgatagattggaaaaggtaataaaagttttttaaagtattttattttattattattttttgtaatatgtatttttagggatatattttatttaaaaaatataggtgaatttatttattttttgtaagttattgaaggagtatatttatattggttaaggatttgttgatgtttttaatatttatttgtaggatatttttaattattgggagaggagtggggttaggagggagttttttttttttagagttttgtttttagagtgaaaggagaagtaaatatgagagatagagtataaggattataagagaatttattgaagttttttttttttgttaagataattatgagtttgtattttaagttttttataatattttatgttaattcggtgtgtgtttttttgatggataaattgattaattatttaggtttattatatgttttttttgaaaggattttgatttattgatatagataaaaataaaatgttttttggttttgttttttttcgttttattgtttattttgtatattttagttttattgtatttggttggagtttaggtattggtaataaaaaataaatgttaatttagatggttttaatgtattattataattgagagtattgaagtaaataatttgatgtaaaagtaattatttaaaattttgaatttttagattaataattagttgggaatatatgatttaatagaaatggttatattttatgttttgtatatttaaaaagtatgttaatgttatattaaagattaggagattttgttttttataatgaaatttttttaaatatttaatatagtttattaaaaatatagtagtttaaatatgaaatagttaatataatttatatattttaaataattaaatatatattaagtaaattattttagtagatataaatatttttattattaaattttttaaaaaaaatttttgaaggtaggaattgttattttttattttttaaatgggaaaagggagattttgggagaataggatatttgttggtgttatatagtttatagttggtagaattgggatttgagttgaggttttttgatgtttatcgtggtgtattattttttatattagagttgttttgagaataattttagtaaaataaaataaatttttaaatattagttattttgaatatatattatatttattttgtttataaaataggttttatattaaatagaattttttatttgtttttaagggaaatagtattagagatgtttatgagaagaaataagggattttttttttttattattgtagaagtgaaacgtttagtgtaattgagggaaaaatttggtgttaagggtttgagaaattagggtttttcgattttttagttatttttagatatggttgttttttattgtttttggttttttatttttagatatgatgtaataatgtatagaaagtaaaggaaattatggatagaattatagttgtggatgtaataaaagatgggaggtagggaaattattaaatggatttatagtatagaattattataatgtatagattttaataggagttgatatattgagttgaggatttaaatataattagaaagatatattttattagattattaatgttaatatttgtgtaaagttattttttttaaagatattattatatttgttttaaattttttagtgaggttatttttattttttttattaagaaaaataaagttatgttaagatatagttgtataaagttttattggttatttttaatagggattttaataatttatagagaattgttatattttatgttttttttgaattttttaattatttttgtttataataaaattgatttattttcggaatgaggaagttgagttttgaagatttagtattttagttaagaatatgttgtttgttagtgttagagttgggattagaatttataagttttgtattttaaaggttttattttaagtaaaatatttagtttagttgggtttattaatatttattgatagtgtataatgatttaggatttcgtaatttagtttagtaaattatttttaaaataaatattaattttattaataattatagttttagttgattagattgagaggttagaagagtttggttttataatatttagtatttaggtaagttaaaggttttggagaagtttttatatagggtaaagaaaagtaataatttggtttttgatttatgaaattttaaattttaatagaaatatattattttattttgggtaaaataagttcggttgttgtttttataataattattttattttttaggaggtaggggttttagtttagtttttttttttttttgttgagttgcggtttttttttagattttttagtttatagaaagaaagaattatagataatgtgtagatagaagggatatttgagattaattattttaaattttgtttttttttttttaagaaatgagtaattattgatttagtgagataaagtattataattataatgttttagtataagatttttttttttttttttttttttttagatagagtttcgttttgttatttaggttggagtgtagtggtgcgatttcggtttattgtaatttttagtttttgggtttatgttatttttttgttttagttttttaagtagttgggattataggtgtttattattacgtttagttaatttttttgtatttttagtatagatagggttttattatgttgggtaggatgattttgatttttcgattttgtgatttatttatttaggttttttaaagtgttgggattataggtatgagttataacgtttagttaagattttttttagaattttagttttttaatttttaatttagtgatatgttatattttattttatagaatttatattttagtttaaatgattaggggagtattaatattaagttttttatagttattgagtaatataaattttagtttgattagaatggtggattagagtaggtttttgaaatagtttggggtttttggtaatattaagtggaaagtatataattattatatgtttttttttttgtatttatatatagttttttttataattaagaatttttattagttataattaatgaattaatattgacgtattattattaattaaagtttatagtttatgtagggtttattttttgtgttgtatattttatgggatttgattaatgtataatgatatgtgttattgtaatattatataaaatagttttattgttttaagaatttttgtgttttacgtgtttttttttttttttttgtaagttttagtaataaataatttttgtagtgtaggtatagttttgttttttttaaaatgtaatacggttggaattatatagtatgtagttttttaagatttaatttatttatatgtataaagtttttgtatgtttttttatggtttgatagtttattttttgttaatattaaataatatttattgtataggtttattacgttgtttatttatttatttattgaagaatattttggtgatttttaatttttgataatgatgaataaagttgttataaatatttatgtgtagatttttgtgtggaaatgtatttttaatttatttggtaaatattaaagagtataattattagataatgtggtaaatatattttagtttttttaggtattgtttatttgttttttgaagtgtttttattattttgtatttttattagtaatgatttagtttttattgttgtatatttttgttaatatttggttttattagtgttttggattttagttattgtataagtgtgtagttgtattttattggggttttagtttgtaggttcgtagtgacgtttaatgatgagtattttttatatatttatttgttatttgtatttttttttgggtgaggtgtttgtttagatttgttgtttattttttaaattaaggtgtttgatttttaattgtggagttttaaaaatttttggagagaagtcgtttattagatatattttttgaaagtattttttttagtttttgtttttttattttatttttttgatagtgttttttgtagagtagaagtttaaattttaataaggtttagtttagttattttttattttatggattatatttttattgtagtattttaaaaattattgttgattaaggttatttttatttttttttattttatattattagagatttatagttttgtattttatatttggatttaatatatatatgtatatatatatatatatatacgtatatatatatatatatatatatatatatatatatatatatatatatatatatatatatatatatatatatatatatatttttttttttttttttttttttgagattgagttttattttgttatttaggttggagtgtagtggtttttaattcggtttattttaatttttgttttttgagtttaagcgatttttttgttttagttttttgataatttgggattataggtgcgtgttattatgtttagttaattttttgtatttttagtagagatgggggttttatcgtgttagtttaggatggtttcggatttttgatttgtgatttgtttattttagttttttaaagtattgggaatattgggtataagttattgtattcggtttagatttataatatatttttagttaatttttattaaaggtgtaaggtttatttttagatttattttttcgtatgtgaatttttagttattttattagttttcgttgaaaagattattttttttttattgaattgttttttttttttttttaaagattagttgattatatttttgatgatttattttagattttttatttatttgtattaatttatttgattttttttattaattgtatattgttttgattagttttatagtaagttttgaagttgaattgggtaaggttagttatttgattttgttttttttaacgttggttattttgggttttttggtttttttatataaattttataattagattgttagtatttaaagataaaaaataataaaaataataaaatttttttggagtttgatttttattgtgttgatttatagattaaattaaaaagattaataacggtttttatatttatgaatatgaaatatttgtgtatttatttatatttttgtttttttttattagagttttgtagttttttttaagtgatatatgtatt

SEQ ID NO: 39 - DNA, 5884 bp, Artificial Sequence
  chemically treated genomic DNA (Homo sapiens)
agttttttaaagtgttgggattataggcgtgagttatcgagattagttttattttatttatttttatttggacgtttgattttatttgagatataggtatagtgatttttagtaggaaatagtttgtttttacgttacgtttagagatttattattggttgtttggtttggtgataaagtttatgcgtaagttttggttggggtggatatgaataggtatatgttaagaattaatttattttttggttagggtgggagattgtgttgtgtttttttagattatttttaggtttagtgatttttagaaggttttatagttttagaaaagttgttattttttttgttaatagtttattatagagaagggtatagattaaagttagtaaagatgaaaggtatagggattagagtttagaatgattaggttaaggttgtagtttttttttttggtggatttttataggtagtgtttaatttttttttaatagtaagtgaggtagtagagagttttgttagttacggaagtttatttgggttttggtgtttatggtttttgttgggagttggttattttaggtttgagttttcgtagtatggttgattttagttatttagtttttagttttttttgaagttagatggatataggtttgacggttttattttcgattatattgttggtataaattgtgttgtacggtttaaggttttagttatgtataaagatattattttaggtaggatattttaaggttttagtagatattttttagttttttgttaagagttagtttggatttttggtttagtggtttgtattgtgtaaggaatgatttttttattttttattatataggttattttttttggttttaatagtaaaatgatattagtttgagtatttgtgtgtgtgtgtgtgtgtgtgtgtgtgtgtgtgtttttttgagatagggttttgttttgttatcgaggttggagtgtagtgatgttattagggtttattgtagttttgattttttgggtttaagtaatttttttattttagtttttttagtagttgggattgtaggtatatgttattatgttttgttaatttttgtattttttgtagagacggagttttattatgttggttaggttgttttcgaattttttattttaggttatttgattgttttagttttttagagtgttgggattataggtgtaagttattgtgtttagttaaattttttttttaatttttttattgaattattggttatttcggattatattgtttaatttttacgtgtatgtatagtttttagaattttttttgttgttgatttttatttttattttgttgtggttagagaagatgtttgatattattttaatatttgtaatgttttaagatttgttttgtgatttaatatatggtgtatttttgagaatgatttatgtgttgaggagaagaatgtgtattttgtagattttagacgaagtgttttgtaagtatttagtaggtttattttttttgtagtgtagattaagtttaatgtttttttattgggtttttatttgggatattcgtttaatgttgaatgtggggtgttgacgtttttagttgttattgcgttaacgttttttttgggttttaataatatttgttttacgtgttttagtgttgtgtgtatatgtatttataattgttatattttgttgttggatgattttttttgtttttttttatagtttttttggttgttgttgtttgtttgttttgttttggagacggagtttcgttttgttatttaggttggagtgtagtggcgcgattttggtttattgtaagtttcgttttttaggttgacgttatttttttgttttagttttttgagtagttgggattataggcgttcgttattacgtttggttaattttttgtatttttagtagagacggggttttattatgttagttaggatagttttaattttttgatttcgtgattcgttcgttttggttttttaaagtgttgggattataggcgtgagttattatattcggtttttttttatagtttttgttttaaaatttgttttgtttaagtattgttatttttgtttttttttgttttttattggtatggagtatttttttttatttttttatttttagtttatgtgtatttttataggtgaagtgtgttttttttagataaaagagtattgagttttgtttttttatttatttagttattttgtgtttttgtattggagagtttagtttatttatatttaatgttattattgttaagtagggatttatttttgttattttgttatttttttttttattgttttgtggtttttttttttttttttttttttttttttttttttttgttttttttttaatgaaggtgattttttttggtggtatgatttaattttttgtttttttgtgtgtgtgtatttattgtgtgttttttttttttttttttttgagatatagttttatttattgtgtgttttttgatttgaggttgtcgtgaggtttgtaaatattattttataatttattattttaaacggatgataatattgattgtgtaaataaatataaagtaaaaggaagattaataaaaattttatattttaagtttattttagtgttttttaattttttgttgtttttttttttttgtttttgagataaagttttgttttgttgtttaggttagagtgtagtggtacgattttagtttattgtaatttttattttttaggtttaatcgatttttttgttttagttttttgggtagtaggcgtttattattatgtttagttaaattttttgtatttttagtagagatggggttttattatgttggttaggtttgtttcgaatttttgtttttaggtgatttatttattttagttttataaagtgttgggattatttgcgtgagttatcgggttcggtttttttatgttttattgtattgtttgttttgaaaagtatttattatttttgattggtttattatttagtttaattaaaataagagtagtttatatattataattatagtattataatattttgtttttttgtgtgtttattattattagtgagttttgtatttttagatgatttttttttgtttattaatattttttttttttttagattgaaaaattttttttagtattttttgtgggatataggtttggtgttgatgaaatttcgtagtttttgtttgtttgggaaggtttttattttttttttttgttggaaggatatttttgttagatacgttattttaggttaaaagtttttttttttttagtattttaaatatgttatgttatttttttttggtttgtaaggtttttattggaaaggtggttgttttatgttatgtattggagttttattgtatgttatttgtttttttttttttgttgtttttaggattttttttttatttttgatttttcggagtttaattattagatgttttgaggtcgttttttttgggttaaatttgtttggtgttttataaattttttgtataaaaaattagttaggtatggtggtgggtatttgtaattttagttatttgggaggttgaggtaggagaatcgtttgaattttggaggtggaggttgtagtgagtcgagatcgtattattgtatttttatttgggcgatagagtaaaatttcgttttaaaaaaaaaattatttgggttcggtggtgtttgtagttttagttatttgggaggtaggaggtttatttgatgttgagattgtagtgagttatgattttgttattgtatttcggttcgggtaatagagtgagattttgtttaaagaaaaaataaaaataaaaaagtaatatattttaaataaaggattttttataatgtttttattagatttttaattagaaatatggaggttaggaagtagtggagaatgacgatttttaggtagttttggaggatgttgttataggttggggtaagggtttttaggttattaattgggagttttgggaatagttttgttgtaaataggaagttatggttcggttagagtttagaatgtgggttgagttgggatttatgtgatagttttgaggtttatcgggagtagtttttggataggagaggttttatttaggaaatttcgggtatggttgggaagtggggtatttggtgtcgggtttgtatgtgtgtgtgattggtgtgtgtgagagagaatgtgtgttttgagtgttagtgtgagtttgtgtatgtgtgaatattgtttttgtgtgggtgattttttgtatgtgtaatcgtgtttttgtaagtgtgaataagtggataagtgtttgggagtggataagagatttgtgtattattaggtgtgtgtatagcgtttgtgtatgttaagagtgtaaggtgaagtgaagggattaggtttatgatgttatttattattaggagttttaaggttttaggtaagtgttagtgatagataagggtgttgaaggttattttggagtgggtaggtgggggtagggaaagggtaaggttatgttttggaggaggggttgtgattatattagggtgtatgagtttagttgggaggtggatggtcgggtttattgagattttggttattttagaagtttgtgtgggtttggggagtttggagtggggagagggggtgattttttcgattaggtttttttattattttattttgggtaagggtttggagtaggaagtagcggtaaggatttttggagtagtttatatttgttttggtttgattttgttattggtagtatagttaatatagtaggtttatttatagtagagggcgaaggttattattagttttttttataagggaagggttacgcgttcggtgtgtcgagagtgttttgtttggttttttgtgtttggtggggtgggggtgttaggtgtgtttagaggagtttagttggtagtgaggtagttatggggttagaagtattggtgtttttggttatgatagtggttatttttttgtttttggtggatttgatgtatcggtattaacgttgggttgtacgttattcgttaggttttttgttattgttcgggttgggtaattttgttgtatgtggatttttagaatatattatattgtttcgattaggtgagggaggaggttttggagggcggtagaggttttgaggatgttttattattagtaaatatgggtggtgggttaaattataggttggattagaagttaggttgagaaggggaagtaggtttgggggacgttttggggaaggatatttatatatggtatgaaggattggattttttaaaggttaaggaagagtagggtaagggtttggaggtggagttggatttggtagtgggtatgtaagtttattgggtaatatatgttatggagtataaagttttttttgttgatattagaaggaaaggttttgggaatggaagatgagttagttttgagtgtcgtttaaattacgaaatcgaggatgaagggggtgtagtgattcggtttaaattttttgtattgtgggttttcgggttttattgtttatcggtatggattattatttgggaatgggatgttaattggggtttttcggtaattttggtgatttttgtaaggttatatttgggtgacgtatttaaattgagtttttttattatagaaggtgtgatttttattttcgttttaggattaggaggttgggttttttttttttatttgtttatttttggtagtttcgggggtcgtttaaggtttaaataggattaggatttgtagtttggggtgattttggtttgataagaggttttgattttttttttgtagt

SEQ ID NO: 40 - DNA, 5884 bp, Artificial Sequence
  chemically treated genomic DNA (Homo sapiens)
attgtagagggagggttagggttttttgttaagttaggattattttagattataggttttagttttatttgaattttggacgattttcggggttattaggagtgagtaggtggaaggaggagatttagttttttgattttggggcgggggtgggggttatattttttgtgatggaggaatttagtttggatgcgttatttaggtatgattttgtaagagttattaaaattgtcgagaggttttagttagtattttatttttagatgatggtttatgtcggtgagtagtgaggttcgaggatttatagtgtaaaaggtttgaatcgggttattgtattttttttattttcgatttcgtgatttaaacggtatttaggattaatttattttttatttttaaggtttttttttttggtgttagtagaagggattttgtattttataatatatgttgtttaatgggtttgtatgtttattgttaagtttagttttatttttaggtttttgttttatttttttttggtttttggaaaatttagttttttatgttatgtataaatgtttttttttaggacgttttttaaatttgttttttttttttagtttggtttttgatttagtttgtggtttaatttattatttatgtttgttggtggtggggtatttttaggatttttgtcgttttttaggatttttttttttatttggtcgaagtagtatggtgtgttttggaagtttatatgtagtaaggttgtttagttcgggtagtggtaggggatttggcgggtagcgtgtagtttagcgttggtgtcggtgtattaggtttattaggagtaggaagatggttattattatggttaggggtattagtgtttttagttttatggttgttttattattaattgggtttttttggatatatttggtatttttattttattaggtatagaggattaggtaggatattttcggtatatcgagcgcgtgattttttttttataaagggagttgatgatggttttcgttttttgttgtgagtgaatttgttgtgttgattgtgttgttagtggtagagttaggttagggtaggtatgggttgttttagaggtttttgtcgttgttttttgttttaggtttttatttagggtagggtggtagaaaggtttggtcggagaagttattttttttttttattttaagttttttaagtttatataggtttttgggataattagggttttagtggattcggttatttattttttagttaggtttatatattttaatgtagttataattttttttttagaatatgattttgttttttttttatttttatttgtttattttagagtgatttttagtatttttatttgttattggtatttatttggggttttagagtttttgatgatgagtggtattatgggtttggtttttttattttattttgtatttttgatatgtatagacgttatgtatatatttgatggtgtatagattttttgtttatttttagatatttgtttatttgtttatatttgtagggatacgattatatatgtagaaaattatttatataaagataatatttatatatatatagatttatattgatatttagggtatatatttttttttatatatattagttatatatatatatagattcggtattaagtattttattttttagttatgttcgaggttttttggatgggattttttttgtttagaggttgttttcggtgagttttaaagttgttatatggattttagtttagtttatattttgggttttggtcgggttatgattttttgtttgtaatagggttgtttttagagtttttagttggtagtttgaaggtttttgttttagtttgtgatagtattttttagggttgtttgagggtcgttattttttattgttttttggtttttatgtttttgattagaaatttggtggaaatattatggaggattttttatttaggatatgttgtttttttatttttattttttttttagatagggttttattttgttgttcgggtcggagtgtagtggtaggattatggtttattgtaattttaatattaagtggattttttgttttttaagtagttgggattataggtattatcgagtttaaataattttttttttgagacggagttttgttttgtcgtttaggtgggagtgtaatgatgcgatttcggtttattgtaatttttatttttagggtttaagcgatttttttgttttagttttttaagtagttgggattataggtgtttattattatgtttggttgattttttgtataagaagtttatagaatattaagtagatttaatttaaagaagacgattttaaggtatttgataattaaatttcgaaaggttaaggataaagaaaggattttaaaagtagtaagagaaaagaaataaataatatgtagtagagttttaatatatgatatggggtagttatttttttagtggaaattttataggttaggggggagtggtatgatatatttaaagtgttgaaggaaaaaaaatttttagtttagaataacgtatttggtaaaaatatttttttaataggaaggagaaataaagatttttttagataaataaaagttgcgagattttattaatattagatttatattttataagaaatgttaaagggagttttttaatttgaaaaaaaaaaggatattaatgagtaagaagaaattatttaaaggtataaaatttattggtaatagtaagtatatagaaaaatagagtattataatattgtaattgtggtgtgtaaattatttttattttaattagattaaatgatgaattaattaaaaataataagtattttttaagatagatagtatagtaagatataaagaggtcggattcggtggtttacgtaggtaattttagtattttgtaaggttgaggtgggtggattatttgagggtaggagttcgagataagtttggttaatatggtgaaattttatttttattaaaaatataaaaaatttagttgggtatggtggtgggcgtttgttatttaggaggttgaggtaggagaatcggttgaatttgggaagtggaggttatagtgagttgagatcgtgttattgtattttagtttgggtaatagagtaagattttattttaaaaataaaaaaagagaaataataaaaagttaaaaagtattaagatgaatttaaagtgtagagtttttattagttttttttttgttttatgtttgtttatataattagtgttgttattcgtttaaaataatgagttataagataatatttgtaagttttacggtaattttaaattaaaaagtatataataagtgagattgtgttttaaaaagaaaagaagaaaaaatatataatggatatatatatataaaaaagtaagaaattaaattatattattagagaaaattatttttattaaaaggaagataaggaaaaaaaaaaaaaaaaaaaaaaaaaagagaagattataaaatagtgagaaaagaaataataaaatagtaggagtaagtttttgtttagtaataataatattgaatgtaaatggattaaattttttaatataaagatatagagtggttgaatggatgaaaaagtaaagtttaatgtttttttgtttagaagaaatatattttatttgtaaagatatatatggattgaaaataaagggatggaaaaagatattttatgttaatggaaaataaaaaagagtaggagtagtaatatttagatagaatagattttaaaataaaaattgtaagaggaggtcgggtgtggtggtttacgtttgtaattttagtattttgggaggttaagacgggcggattacgaggttaggagattgagattattttggttaatatggtgaaatttcgtttttattaaaaatataaaaaattagttaggcgtggtggcgggcgtttgtagttttagttatttaggaggttgaggtaggagaatggcgttaatttgggaggcgaagtttgtagtgagttaagatcgcgttattgtattttagtttgggtgatagagcgagatttcgtttttaaaataaaataaataaataataataattaaaaaaattgtaagaggagataaagaaggttatttagtaatagaatataataattgtaaatatatatgtatataatattggagtacgtaaagtaaatgttattggagtttaagagagacgttaacgtaataatagttaaagacgttaatattttatatttagtattggacgggtgttttagatggaaatttaataagaaaatattagatttaatttgtattataaaagaaatggatttattagatatttatagaatatttcgtttaaagtttgtagaatatatatttttttttttagtatatggattatttttaaggatatattatatgttaggttataaagtaagttttaaaatattataaatgttaaaataatattaagtattttttttgattataatagaataaaagtggaaattaataataagaggaattttggaaattatatatatacgtgaaaattaaataatatggttcggaatggttagtggtttaatgaagaaattaggaaggaaatttggttgggtatagtagtttatatttgtaattttagtattttggggggttgaggtagttagatgatttgagatagggagttcgaaagtagtttggttaatatggtgaaatttcgtttttataaaaaatataaaaattagtaaagtatggtggtatgtgtttgtagttttagttattagggaggttgagatgggaggattgtttgaatttaggaagttaaggttgtagtgagttttgatggtattattgtattttagtttcggtgatagagtaagattttgttttaagaaaatatatatatatatatatatatatatatatatatagatgtttaaattaatattattttgttgttagagttaagaggggtggtttgtgtagtaaaaagtggggaagttattttttgtataatgtaagttattggattaagagtttaaattgatttttgataggaggttgggagatatttgttaaggttttggaatgttttgtttgaaatagtgtttttgtatatagttagggttttggatcgtataatatagtttatgttaataatgtgatcgagggtggggtcgttaggtttgtatttatttgattttaggaggggttggagattgagtaattgaggttagttatgttgcgggggtttaagtttaggatgattaatttttaataaaaattatggatattaaggtttaggtgagttttcgtggttggtagggttttttgttgttttatttattgttgggggagaattaagtattgtttgtaggagtttattagaaaagagagttgtagttttggtttggttattttggattttggtttttgtgttttttatttttgttgattttaatttgtatttttttttgtaataaattgttaatagggagaataatagtttttttagggttgtgagattttttagaaattattgaatttgagggtggtttgggggagtataatatagttttttattttagttagggaatgggttgatttttggtatatgtttatttatatttattttagttaagatttacgtatggattttgttattaagttaggtagttagtgatgggtttttgggcgtgacgtgggggtaggttgttttttgttgagaattattatgtttgtattttaagtaaagttaggcgtttaggtaagagtgaatgaggtgaggttggtttcggtggtttacgtttgtaattttagtattttgggaggtt

SEQ ID NO: 41 - DNA, 5999 bp, Artificial Sequence
  chemically treated genomic DNA (Homo sapiens)
cgattttttgattttatgattcgttcgttttggtattttaaagtgttgggattataggcgtgagttatcgtgttcggttataatggtgatttttaaattaaaaataattgatggggaaggttttttagaaaatattgtttaaattttaaaggttataaaggaaaagtttgaaaagtttaattgtataaaaatttaattttttatatgggaaattaaataagagattgggaggaatttttaaattattaaatatgaaaataattattatttatttgatagataaagagtttttaaaatttgagaggaaatatgtaaaattttaatatgaaaagggaaggaattgttttattaaaaaagaaatttaaataaataattagtagatgaaaagatgttttatttttttattgattagagaaatgtaaattaaagtaatgatatatgaatttttagttatcggtgattggtagtatttagtgttggagtagatgtgtagaaattggtttttttattatattgtggggggttttaagtgttttaattttttgaggaagtagttttatatatttattaatattgtaaatttatatatttagtgatttaatcgttttatttttataaaattgatttatagagataggtgtatgtttgaataaagatatatttatagggtattattgtggtattttttgtaatataaatagttggggaaattatttgaattgtttattaatttaaaatagataaattgtgaaatataaaatgtagtatgtgtgtgtatgtttatataaattgtttttgaagtttggaagaatatatagaatatttataattatagtatggtatatattattgattagtaattaattttatttttaatttttttaatattttgatatatttatttaaaaggtttttttattttttagttttttttgtatagaggagtggtgatattttaattaagaatttaaaaaattttagattttttggaagttttttggaaagtttttatttttttgataaataggatagataagagaagtatttttagaatggtaggataagaagttttgaaaatttgtttttttagaattgtaatgtgaatattagttaaagtgttgaaaaatgaatggagttttagagatttttgggatattattaagggtatttaataggtataatgggaattatagaaagagagaaaataaggggataaaaatattatttgaagaaataatgggtgtaaattttttaaatttgatgaaaaagatttatttatatatttaaaagtttaataaatgaatatttatttattgttatttatttatttatttttaaaatagaataaatgaaaggagagttatatttgtatatattgtagttaaataattaaagggaaattgggagttttggaagtagtaagagtgagatgagtcgttaggtaaattagttttcgataaaatagtaggaatttgtttatttaaaattgaaatgagtcgttaggtaaattagtttttgataaaatagtaggaatttgtttatttaaaattaaaatgagttgttaggtaaattagattttgataaaatagtagcgtttgtttattcgaaatcgaaatgagttattaggtaaattagttttggataaaatagtaggaatttgtttcgtcgaaattaaatgagtcgttaggtaaattagtttttgataaaataatagtatttgttgattagaagttatgggattagtaggtagtgagatgatatagttagggtattgaagaaaaatattgttaattaagaattttatatttagaaaatatttttttaaaaagagagaagtattatagttttttagaatttgtttagtaggttttttggtatttttttttattaatttattaattaaaatttaaaatatgttagttttttggttaagattaaatgttaaaaagaaagagaaattaagatatttttggataaataatatcgagagaatttataagtttgttataagaaatattaaaggaagttttttgggttaaagttaaagaatattagtaatttaaatgtatattatatatagaattaaagtaagtgttaaaaagtattttagtaggtataaaattaaaattgtaaataataaaaagagaattagtagaattttttttttttaatggggtttaaaatatggaagttgtttttgtagggtgaatttgggattcgtagtttttattttatttatttttgtgttgtttgtattcgttaaaaggagatattttatttttttaattaaaattatttttttaatttttataaataattatttaattttagtaaattttttttatattgttttattagtgagttttattaaaattttgaagtatagaaaatttttttatagtataaagtatttttagttatagagaagataggggttttgtaatgatttttagaatagtgtaatttttatgtaagaatttaatataatataaaaattatagttcgattttatttgtgggtatagatgtaaaattattaaaaatattattaataagttgaatttttagggtgttaaaagagtattattttatgaacgagttggttgtgatgtggaattatgaggtatttttatgatataatataaaaatttatggtaattttatggtatattgtgagatagtgtttttttttagtattatattagtaggtttatggagaaaaattataggattgttttaattaaaaaaagattttattaatttaatttttatttttgataaatattgttagttatttagagaaagaagaaaattgttttaatatagttatttttttgttatatttagttaatagtagacgtgatggaagtttgaagaatattttgttacgggtataggtagaggtataggtattttgtcgttttgattattttattttgttacgggtagaggtataggtattttgtcgttttgattattttattttgttacggatagaggtataggtattttgtcgttttgattattttattttgttataggtataggtattttgtcgttttgattattttattttgttataggtataggtattttgtcgttttgattattttattttgttacgggtagaggtataggtattttgttattttgattattttattttgttttagagtgttttgttaatgggatagatgtaaaataaataaaagtttcggtttttgaaaagaagtatatagaaatgttattatttttaaacgaggtgttttcgtatataaaatttgatgttggttgggtatttaatagtattatggttagaggatttagattatagttgtatttttgtgaggtatagattttttagggtacgcgggtttcgtttgggatgtgtatatttaggtgagttgtatagataaggtgtttttagtttaagggagttagaggtttgttatttggttattggttttgaaagagaggaggaggcgggaggttaatttattcgtgagttagtcgagttttattgttagattttatttttttttgtgttaaaaattagagggaagtttttttttttgaagtttttgttagaggttaacgtttttttttggtttaggagaggtgtagtgttaggtgtagtataattaatgatttgtttatgtggttaataaattgttaagtagaaaaattgggttagaatgtaatatatagtatgtagttttatttttgtataaatataagtatagaatggtataatttaaaatttataagtgatttggttggattgtaaatgatttttattttttttattttttattatattttttattatatataaagatttattgttaatataaaagtataaaattgtaatttatgaattaagaatttttatatattgttagttagaagatagaatgaaaaatattttttttattttaattatatatataaaaaagttttataaaatatttatggattatttttatagaaggtggaagagggtttgtatgaagaaaataattaatatatgaaagaagaagttagttaatgtggagttttattgtgtttcgggattaataaagataagatatttttaaaatcgttttttaaatttattttaatgtaaaataaatttaataaaattttaatgtaattttttaagaatttaaatttggaataattttaaagaataattttttttaattttttatagttagaatatatatttttaaaaaaaatgaaaatagagattaatttttttagaattggttgatttattttttttttttattttttttttatggaattttttagttaatttgagaaagtggaatcgaatttcgatgttgaattttttttttggttttatttatgtggtaggtggtgatttaggtattattgggggttgtttagataaatttttttattagatattaagaggttgttgtattaggagggtcggtatcgtgtttagaggtggtcggtatggggttggagttgtattatataaattttattttaaataaatgtatggggatgtggttggagtttttcgttgtttaattagtgttaaagggtaggacggtattttattttacgtttttaattatgggttggtaatatgtttttggatgtgtttgttggtatagtgataggtgttagtaattagggtgttgatatagtttaattttatttttattaggttattggttggaatttttgggggttattattgcgggaattagtttttgaaacgatggttaatagtagttaataataaattagtaatttgggatagacgagtagtaagagggtattggttggtgggttatttttttttttagaatatattataaaaatttttcgtttttataggattgtttttcgggttggtagtagggttttagcggtattatgtttgttttcggagttatcgtggttttgttggtgtgggcggttttttttttgttggtgtttatgtggaggtaggtgtatagtagttggaatttgtttttaggttttttttcgttttttattatcgggaattttttttagttggaattgaagaatatttttaagttttttattcgggtaagagaaatagtgttgattttagggagaataatttagtaattggatttggtatgtgtgtatttaatttatttgtagataaattgtggttgtttaatattagtttgttgtgaattatttgaattgatagtattttggagcgatatttaaaatgtgtcgtttgtggtgtagttggagttcggagtttgcgtgttaggtttcggaggttttcgtcggtgttttgttttggggttgatgatggggaggtcggcgaggtcgggttgttgcgacgttaggataatcgggttggcggttagatgcgtattcgttgggcgttcgtttgtgtttgttaaagtacgagttgaaacgtgaagtgttgggttagttcgtgtggtattaatatttgtcgtttacgattgttgtgaatattgaatgggttaataaatttaaacgttaaatgaattgataacgtcgttagtacggagtaggcgttgggtgtttgcgtttttgcgcgtgcgttttgtggggcgtaggttgacggcgggcgggggtcgtttgttttagttcgggttttcgcgttagaatcgggtttagaattttgatttcggaagcgggtaacggggtggttggtgggcgcgtttgagggaagggacgtgaggagtcggagttcgcggagttgtcgcggagttgttcgcggagtttaggcgggtggggagtagagtagttggaatttttcgagcgttttgtagacgtagtagttttttgaggggagggttttttttatttcgggttggataaagatagtttttttttacgtttttttgggttttttagagtaatagtaatattcgttcggtaggggtgtggtttagagtttcgtattttttcgtcgcgcggcgggtttgatttttagttacgggttttcgtagt

SEQ ID NO: 42 - DNA, 5999 bp, Artificial Sequence
  chemically treated genomic DNA (Homo sapiens)
attgcggagattcgtggttagaagttaggttcgtcgcgcggcgaggaggtgcggggttttaagttatatttttgtcgggcgggtattgttgttgttttagagaatttagagggacgtggggaaaagttgtttttgtttagttcgaggtgggggagattttttttttaagaggttgttgcgtttgtagggcgttcggggggttttagttgttttgttttttattcgtttggatttcgcggataatttcgcggtaatttcgcggatttcggttttttacgtttttttttttaggcgcgtttattaattatttcgttgttcgttttcggaattaaggttttggattcggttttggcgcgggagttcgagttggagtaggcgattttcgttcgtcgttagtttgcgttttatagagcgtacgcgtaagagcgtaaatatttagcgtttgtttcgtgttgacggcgttattagtttatttaacgtttaggtttgttggtttatttagtgtttataatagtcgtaggcggtaggtattggtgttatacgggttggtttaatattttacgttttaattcgtgttttggtaaatataggcggacgtttagcgagtgcgtatttggtcgttagttcggttattttggcgtcgtagtagttcggtttcgtcggtttttttattattagttttaggataaggtatcggcgggggttttcggggtttggtacgtaggtttcgggttttagttgtattataggcgatatattttgagtgtcgttttaggatgttattaatttaggtaatttataataggttggtattgaataattataatttgtttgtaaatgagttgaatatatatatattagatttaattgttgagttattttttttaaaattaatattattttttttattcgggtgaaggatttgggaatattttttaattttaattggaagaggttttcgatgatgggaagcgggaaagggtttgggggtagattttagttgttgtgtatttgtttttatatggatattagtaggaggaaggtcgtttatattagtagggttacggtgatttcgagggtagatatggtgtcgttggggttttgttgttagttcgggagataattttgtggaaacggaaggtttttataatgtgttttgagaaggagggtgatttattaattaatgtttttttgttattcgtttattttaaattattggtttattattagttgttgttggttatcgttttaaaggttgattttcgtaatggtggtttttaggggttttagttagtgatttggtgaggatggagttggattgtgttaatattttggttgttagtatttgttattgtgttagtaaatatatttaggaatatgttgttaatttatagttaagaacgtggggtgaggtatcgttttgttttttggtattggttagataacggggaattttagttatatttttatgtatttgtttggagtagggtttatgtaatataattttaattttatgtcgattatttttagatacggtatcggtttttttggtgtaatagttttttgatgtttgatgaggaggtttgtttgagtagtttttagtagtatttgaattattatttgttatatgaatggggttagaaggaaaatttaatatcggaattcgattttatttttttaagttaattggaaaattttatggaagaaaaataaaaggaaagagtgagttaattaattttgagaaagttaatttttgtttttattttttttaaaggtatatattttggttgtagaaaattaagaaaaattgttttttggaattattttaaatttaaatttttaaaaaattatattagagttttattggatttgttttatattagggtaaatttagaagacgattttaaagatattttgtttttgttgatttcgggatataatagagttttatattgattagtttttttttttatgtattaattattttttttatatagatttttttttattttttatgaaggtagtttataggtattttgtggagtttttttgtgtgtgtggttagaatgaagagaatgttttttattttgttttttaattggtaatatatagaagtttttaatttataggttgtaattttgtatttttatattaataatgaatttttatgtataatagaaaatatgatgagaaatgaagaaaataaaagttatttataatttagttaaattatttgtggattttgagttatgttattttatatttgtatttatataaaaatgagattatatattatatattgtattttaatttagtttttttatttgataatttattagttatataagtaagttattggttgtgttgtatttaatattgtattttttttgaattaagaaggggcgttggtttttggtagaggttttagggaaaaaagtttttttttggtttttggtataaaaaaaggtgagatttggtaatgagattcgattggtttacgggtgggttagtttttcgttttttttttttttttaaaattagtggttaggtaataggtttttggtttttttgggttgaggatattttgtttgtgtagtttatttgagtgtgtatattttaggcgggattcgcgtgttttggagagtttgtgttttatagggatgtagttgtggtttgagttttttggttataatattgttagatgtttaattaatattaaattttatatacgggaatatttcgtttgaaaataatgatatttttgtgtgtttttttttagaagtcggggtttttatttgttttgtatttgttttattggtaggatattttaggataaggtgaaataattaggatgatagagtgtttgtgtttttgttcgtgataaggtgaaataattaggacgatagagtgtttgtgtttgtgataaggtgaaataattaggacgatagggtgtttgtgtttgtgataaggtgaaataattaggacgatagggtgtttgtgtttttgttcgtgataaggtgaaataattaggacgatagggtgtttgtgtttttgttcgtgataaggtgaaataattaggacgatagggtgtttgtgtttttgtttgtgttcgtggtagggtgttttttaggtttttattacgtttgttgttggttgggtgtggtaaagaggtgattgtattgggataatttttttttttttttagataattaatagtgtttattagggatgagagttgggttaatgaaatttttttttgattgagataattttgtgatttttttttatagatttgttagtatgatgttagaagaaaatattgttttataatgtattataaaattattataaatttttatattgtattataaaagtattttatagttttatattataattaattcgtttatggagtgatatttttttaatattttaaggatttaatttgttaatagtatttttagtaattttgtatttatatttataaataaaatcgggttataatttttgtgttatattaggtttttgtataaaaattgtattattttagaaattattgtaaaatttttgttttttttgtgattggggatattttatattgtaggggaattttttgtgttttaaaattttaatagaatttattagtaaagtaatatagagaagatttattggaattaaataattgtttataaagattagaaagataattttaattggggaagtaaaatatttttttttaacgaatgtaaataatataaaagtgggtgaagtggaaattgcgagttttaaatttattttataaaggtagtttttatattttaaattttattgagaaggaaagattttgttaattttttttttattatttgtagttttaattttgtatttattaaaatattttttggtatttattttaattttgtgtataatgtgtatttgagttattagtgttttttgattttgatttaagagattttttttagtattttttatgataggtttgtgaattttttcggtgttgtttatttaagaatgttttaatttttttttttttttgatatttgattttagttaaaaggttgatatattttaaattttaattaataaattaatgggggagggtattagaaaatttgttagataaattttaaagagttgtaatatttttttttttttggaagaatgttttttggatatagaatttttggttagtagtgtttttttttagtgttttgattgtgttattttattgtttgttggttttatggtttttggttaataagtgttgttattttattaagggttgatttatttgacgatttatttggtttcggcggaataggtttttgttattttatttagggttgatttatttgatgatttatttcggtttcgggtgaataggcgttgttattttattaaggtttgatttatttgataatttattttggttttgggtgaataggtttttgttgttttattaagggttgatttatttgacgatttattttagttttgggtgaataggtttttgttattttatcgagggttgatttatttgacgatttattttatttttgttgtttttaggatttttagtttttttttgattgtttgattatagtgtgtgtaggtatggttttttttttatttattttattttgagaataaatgaataaatgataataaatgaatatttatttattaagtttttggatatgtagatggattttttttattaaatttggggaatttatatttattatttttttaaatagtatttttgtttttttattttttttttttttgtgatttttattgtatttgttagatatttttgatgatgttttaaaggtttttgaggttttatttattttttaatattttagttggtgtttatattgtagttttggaggaatagatttttagagttttttattttgttattttagaagtgttttttttgtttattttatttattaggaaaatgagagttttttaagaaatttttagaaaatttgagattttttaaatttttggttagaatgttattatttttttgtgtaagaggggttggaaagtggaaagattttttaagtgaatgtgttaaaatattaagggaattaggaatgggattgattattaattaatagtgtgtattatattatggttgtaagtattttgtgtatttttttaaattttaaaaataatttatataaatatatatatatatattatattttgtattttataatttgtttattttgagttgatgaataatttaaatggtttttttaattatttatgttataaaaggtgttataatggtgttttgtagatgtatttttgtttagatatgtatttatttttgtaagttagttttgtgggagtgggacggttaggttattggatatgtggatttataatgttaataggtatataaaattgtttttttaaaaggttgaaatatttaaaattttttatagtatgatgggagagttaatttttatatatttgttttaatattagatattgttagttatcgataattgaaaatttatatgttattattttaatttgtatttttttggttaataaagaagtagagtatttttttatttattgattatttatttgaattttttttttaatgaaataattttttttttttttatattgggattttatatatttttttttagattttaaggattttttgtttattaaataaatagtagttgtttttatgtttgatggtttggaagttttttttagttttttgtttgattttttatgtagaaaattagatttttatatagttaaattttttagattttttttttatggtttttggaatttagataatgttttttaaaagattttttttattaattatttttaatttaaaagttattattatggtcgagtacggtggtttacgtttgtaattttagtattttgggatgttaaggcgggcggattatgaggttaggagatcg

SEQ ID NO: 43 - DNA, 6731 bp, Artificial Sequence
  chemically treated genomic DNA (Homo sapiens)
agtttttttttgttgtttaggttggagtgtagtggtgtgatttcggtttattgcgatttttgtttttcgggtttaagtaatttttttgttttagttttttgagtagttgggattataggtatatattattatgttaagttatttttgtatttttagtagagtcggggttttattatgttggttaggttggttttgaatttttgatttttattgatttgtttattttagttttttaaagtgtcgaattataggtatgagttattatgttcggttagtttattggttttttatgaaaaatatttaatagagagaagaaaataaattatataggaaatgaaaatatgatatagttattttggaaaagagtttggaagttttttataaatatatatttattatagaatttagtagttatatttatagatatatttagatatacgaaatatagatttttataaagatatatgtatatatgttaagaataatatatattatttaaaatagttagattttgggaataatttatatttttattaattggtgaaaagtaaattgtggtatatttatatgcggtgatatgttattttgtaatgaaaaggaatgagtttttgatgtatgtaatatatggttaatttttaaaagtattacgtatgttttttagaagtaggtttggtatatggaagaaatgttgtagattttttttttttttttttttttttgagacggagtttcgttttgtcgtttaggttggagtatagtggtatgattttggtttattgttattttcgttttttaggtttaagtgatttttttgttttaggttttcgattagttgggattataggtattttttattaagtttagttaatttttgtattttttatagagagaggggtttattacgttggttaggttggttttaaatttttgattttaggtgatttattcgttttagttttttaaaaagttaagattataggcgtgagttattatgtttagtcgtagatttttatttatatgaaatgtagattaatagtgggaagaaaaaattagaatagggttggatgtagtggtttaagtttgtaattttagtattttgggaggttgaggtagaaggattgtttgagtttaggagttcgagattagtttgggtaatatagggagatttttgtttttataaaaaatttttaaattagttagttgtgatggtataggtttttatttttagttatttaggaggttgaggtcgggggattatttgagttagggaggttaaggttgtagtgaataatgattatattattgtattttagtttgggggatagagtaagattttgttttaaaagaagagaaaaaaatttagaataatggttgtttataagagatggagtatggttgattaggaaggagtaggaaggagggttttttttttattattattattattttagagaagggagtttttttttgttatttaggttggagtgtaggggtgtgtttatagtttattgtagtttggaatttttgggtgtaagtgattttttattttagttttttgagtagttgggattataagcgtgtattattatatttagttattgttttttttttttttttagtagagataggggtttcgtaatgttgtatagtttggttttaaatttttggtttttagtgatttttttattttagttttttatagttaggattataggtataaattattacgtttagttttaagagaatttttttggatgatgaaaatattttgtatttttatagggatttcgatatttttaaaatttagtaaatgtttatttattatgtgtgtattttattataggtaaattttatttaaagaaatcgttaagggaaaattttatttatatatttttataggaattatgatatagtaaatagaattaagttttttagttggcgatggaatgggatttggtatattagaagggggtttatttaagtttgatatgggatattgtgtggttttagtaggaaggaaggttgtatgtgtcgtttagatgttagtgggtaagaggataggatgatggaggatgcgttcgtttattgtttattgttgttatttttttcgtgagataagaagcgggtttattaataaagagtgaggtgattgaagagggttttggagtttgaggaggtaggaataaaaggataggaatagggcggggggagttttaagagaggataatgagaggcgaggtatttttttattacggagtgtgttttagttttttgtaatattttagcggtttttaattgggttgatttttttttttttaaggggatatttaatagtatttggagttatgtttgtttgtaataattggtagggaatgagtgggtgggttttgttatttattgagtagaaattaaggatattgttaaatattttattatatataggatgtagtttttattatttatgaaggtttaagatattaatagtagtgagttgagaaattgtaatatattttttttttgttttaagttttttttgtagtaggagagtaagttagaataatagaatttaaagttttttaaaattttttttttcggttatatatggtggtttacgtttgtaatttttagaggtttaggtgggaggatcgtttgagtttaggagttggggattagattgggtgatatagtatgttagattttatttttattaaaaattttaaaaattagttaggtgtggtgatgcgtgtttgtagttttagttatttgggaagttgaggtaggagaattttttaagtttaggagatcgaggttgtaatgagttatgattatattattaaattttagtttgggtgatagagtgagattttgtgttaaaataaattaattaattgttttttttataaattttagtttttttaattaggtggttttattaggtttatttttttttttttttttttttttttttttgagttaaagttttatttttgttgtttaggttggagtgtaatggtataattttagtttattgtaatttttatttttcgggtttaagtgatttttttgttttagttttttgagtagttgggattataggtaagtattattacgtttggttaattttttttgtatttttagtagagatagggttttgttatgttggttaggttgttttaaatttttgattttaggtgatttatttatttcggttttttaaagtgttgggattataggtatgagttattacgtttagttttattaggttttttttaattaagttttagggtgagggataagttgtttatagggttggcgtggatatagtattatattttttttttaaaagtagggagtagacgttaagggaaattagagttatataattttattattaagtttttagtttttttttaggatttgttttaatcggtttatttaggattgaaataatagtatgggttttatttttattttattatatgtttgggatttagggtgttaaattttttaggatttttaaatatttttttttttgtttttttgagaatagtaattttggtgtatatttacgaatttgtgggggtatttatatttttatttggttttttagatttttgatcgtaggggttttttatttagtttagtttttggtattagagttttggtttagttttaggttttgtattttgtttttgtgatttggttaggaggtgggtaattagggttagttttttttttttttttttttttttttttttttgagatcgagttttattttgttgtttaggttggagtgtagtggtatgtttttagtttattgtaatttttatttttcgggtttaagcgatttttttgttttagttttttaagtagtttagattataggcgtgagttattatgtttggttaatttttgtattattagtagagatagggttttattatgttggttaggttggttttgaatttttgattttaggtgatttatttatttcggttttttaaagtgttgggattataggcgtgagttattgcgtttggtttattagggtgagtttttaaggtaggagttgagagtagatatggttagtagggtgtttaggagggtaggaggagggttgtttatgagttagtggtgggagagagtgttattttagtttgagaggttttttttttgtggtttttagttttgttttttttttaaatatttttttagttttagtttggttttagttttattaagtgtagtttgattcgtggagatatgagagatagagagagtgagagattagagagattaggagatagtgattgagagggatttatagggagattagggagagaagtagagagaaggagaaagtttagagagtataagaaatgaagatttagagatattaaaggagggagagatagagatatagagagataaaaagatttagaggtagagattgtagaggtagaagtaaagtaagatatagagtattttagagatttacggtaagagatagggaatagtatggagaattatgaaaaaataggtttttagagaaagagaaaattttagttttggagggaaagggatttagttagggttattcggtttattagtggtagaaatggatttgaatttagagaaaaagaaataagtgttttaaatattaaaggaatttagtttttatttttggtttattattttgcgatagttttatgattattttaaaattaggtttaggttttaattggtaaagtaaaaaaaaaaaataaagaaagaaagaaagttttgttttattttaggagggtttttaggcgtagtttttttttacggtatttttttagttggttgtgagttttagggtcgtaggaaaggtatggtaagatgatgggagggatttaaagtttatagcgagaataagaaaagtggggttaaggaggagggtgtgggtagaaataatttaagaataatttttgttttattattttttaagtatatttagagttgtaggttttagcgtattttagttagtgttttttgtagtttagtaggtaaagggtttcggtgagggaggtagagaaggagggggtgttttttaagagagggtgggtcgttagttttaatttttgtttttgagattggttaggaattttttttgttgttttttttgagagtttttatgtttttgttttgagtattgggatttttttattggtgttttattaagtaggtggtttttttttttgtaatgtaattttatggttggtaatatttgatttttttttgttattgtttttgtttgtgttttttttttttgttttcgtttttttttttttttttttttttttttttttttttttttttttttttgaggttggagtgtagtggtttaattttagtttattgtaatttttattttttgggtttaagcgatttttttgttttagttttttgagtagttgggattataggtgtttaatattacgtttgattaatttttgtgtttttagtagagatagggttttattatgttggttaggttggttttaaatttttgattttaagtgattcgtttgtttcggttttttagagtgttgggattataggcgtgagttatcgtgttcggttttagttttttttggtttgttttttgtagtttattcgtttttttgtgtggttttaatattttttgttttttttattttttttttttttttttttatttttgtttatgtgattttgtttttgtgtatttgtttttgtttgttattttcgttttttttagtttttgtgtttagttttgtttttttttttttttgttttttttattttttttttttttatttttttatgtttttttttgttttttagttagtgtttattttattgtttttttatttaattttttttgtttttttttagttttgtgtttgtttagttttgtttttttttttttttagtttatgttagtttttttttttttgtgatgtgttttttggttttttttatttttgtgtttgtttgtttttgtttttgtgtgttttgatttttttttattattgtttttgtatgatagttttttgatagataggtgatgatagatagataatagatagatgatatatagatgatagattatgaagatagtagatagatgatagatatagatagataatagatgatagataatagatagattaatgatagatgatagaagaatagatagatgatggatagatagatgatagatgatagatagatagatagatgatagatagatgttgatagatgttagataatagatgagaaataaagaaagaaagaaaaagaaaaaagaaagaaagaaaaagaaaggaaggaaggaaggaaagaaagagtgatagatgatagatggttgataggtagatagatatttgtagatatgtagatcgtttattgtttttttgttttttttattatttttatgtatattttttggttttttttagtttttgtttttttattatttgtttttttttatttatgtttttgtgtttttgtttttttatttgtttatatgttgattatttttgttttttttttttttttttttttttttttttattttttggtttttttttgtttttttttttttatttgtttttatttttagggtttagggaaggtaagttttaggggagatggaaaggagggattagcgatgtttttttttattttgttttttatacgttagtagt

SEQ ID NO: 44 - DNA, 6731 bp, Artificial Sequence
  chemically treated genomic DNA (Homo sapiens)
gttgttggcgtgtggagggtaaagtgggagaggatatcgttgattttttttttttattttttttgggatttattttttttaggttttggaaatgaaggtagatggagagaaggagatagggagaggttaggggatggggaagggagggagaaaggaggaaagaggtagagatagttaatatatagatagataaggagatagaaatatagagatataaatggagagaggtaagtgatagaggaatagagattaagagaggttaagagatatgtataaagataatgagagagatagaaaaatagtgagcgatttatatatttatagatgtttgtttatttattagttatttattatttattattttttttttttttttttttttttttttttttttttttttttttttttttttttttttttttttttgttttttatttattatttaatatttattaatatttatttattatttatttatttatttattatttattatttgtttatttattatttatttatttttttattatttattattgatttgtttattatttattatttattatttatttatatttattatttatttattatttttataatttattatttgtgtattatttgtttattatttatttattattatttgtttgttaagagattgttatatagagatagtgataaagagagattaagatatatagggatagagatagataaatatagagatagggagagttagagagtatattatagaaagagagaggttgatatagattagagaaagaaagagatagaattagatagatatagagttagagaaagataagggagattgagtggagagatagtgagatggatattgattgagagatagagagggatatggaaggatggagagaaaaagggtaagagggatagagagagggagagatagagttagatatagagattgagggagacgagaatgatagatagaaatagatatataaagatagagttatatagatagagatggagagagagagagagagaataagagaggtagggaatattagagttatataaagagacgggtaggttgtaaagggtagattaagagagattgaggtcgggtacggtggtttacgtttgtaattttagtattttgggaggtcgaggtaggcggattatttgaggttaggagtttgagattagtttggttaatatggtgaaattttgtttttattaaaaatataaaaattagttaggcgtggtgttaggtatttgtaattttagttatttaggaggttgaggtaggagaatcgtttgaatttaggaggtggaggttgtagtgagttgagattgaattattgtattttagttttaaaaaaaaaaaaaaaaaaaaaaagagagagagagagagagaaagagacggagatagagaggaagggtataggtagaaatagtgataggaaaaaattaagtgttgttaattatggggttgtattgtagagagagaagttatttatttggtgaagtattagtaaagaaattttagtgtttagaatagggatatgagagtttttagaggaaatagtaaaaaagatttttagttagttttagagatagagattggagttggcgatttatttttttttgggagatattttttttttttttgttttttttatcggggttttttatttgttgagttgtaggagatattggttgggatgcgttagagtttgtagttttgggtgtgtttggggggtggtggggtagaggttgtttttaagttgtttttgtttatatttttttttttaattttattttttttgttttcgttgtgaattttaaattttttttattattttgttatattttttttgcggttttagggtttatagttagttggaaaggtgtcgtgggagggggttgcgtttgggggtttttttgggatggggtaaagttttttttttttttttgttttttttttttgttttgttagttggagtttgggtttggttttggggtagttatggggttgtcgtaaaatgatgggttagggatgggggttgggtttttttggtatttggggtatttgtttttttttttttgggtttaagtttatttttgttattgatgggtcgagtggttttggttaagtttttttttttttagagttggagttttttttttttttggaagtttatttttttatagttttttatgttgttttttgttttttgtcgtgggtttttgaaatgttttgtgttttgttttgtttttgtttttatagtttttgtttttgaatttttttgtttttttgtgtttttgttttttttttttttggtgtttttgggtttttattttttatgttttttgggttttttttttttttttgtttttttttttgatttttttgtaagttttttttagttattgttttttgatttttttggttttttattttttttattttttatgtttttacgagttagattgtatttggtgggattgaagttaagttgaggttgaaggagtgtttaagaaaagggtagagttggaagttatagggaaaaagttttttagattagaatgatatttttttttattattggtttataaatagttttttttttgtttttttgagtattttattagttatgtttatttttagtttttgttttagaaatttattttagtaggttaggcgtagtggtttacgtttgtaattttagtattttgggaggtcgaggtgggtggattatttgaggttaggagtttaagattagtttggttaatatggtgaaattttgtttttattaataatataaaaattagttaggtatggtggtttacgtttgtagtttgagttatttgggaggttggggtaggagaatcgtttgaattcgggaggtggaggttgtagtgagttaagaatatgttattgtattttagtttgggtaatagggtgagattcggttttaaaaaaaaaaaaaaaaaaaaaagaagaagaaattggttttagttatttattttttggttaggttataagggtagaatgtaaaatttggagttgggttagggttttggtgttaggggttaggttgggtggagagtttttgcggttaagggtttgggaggttaggtggaggtgtgggtatttttataggttcgtgggtgtgtattaggattgttgtttttagaggggtagaggaggaagtgtttggaggttttggggaatttgatattttaggttttaggtatatggtggggtggaggtggggtttatgttgttgttttagttttggataggtcggttggggtaggttttggaagagggttgaaggtttgatgatgggattatatagttttagttttttttggcgtttattttttatttttaaggggagggtgtagtgttgtatttacgttaattttgtaagtaatttattttttattttagaatttggttaagaggggtttaatgaggttgggcgtggtggtttatgtttgtaattttagtattttgggaggtcgaggtgggtggattatttgaggttaggagtttgagatagtttgattaatatggtaaaattttgtttttattaaaaatataaaaaaaattagttaggcgtggtggtgtttgtttataattttagttatttaggaggttgaggtaggagaattatttgaattcgggaggtggaggttgtagtgagttgagattgtattattgtattttagtttgggtaataagagtgaaattttgatttaaaaaaaagaaaaaaaaagaaaaaaaagatgggtttaatgggattatttgattggggaaattgggatttatgggaagggtagttagttagtttgttttgatatagggttttattttgttatttagattggagtttagtggtgtgattatagtttattgtagtttcgattttttgggtttaagggatttttttgttttagttttttaagtagttgggattataagtacgtattattatatttggttaatttttaaaatttttagtagagatgagatttagtatgttatgttatttagtttggtttttaatttttgggtttaagcgatttttttatttgggtttttggggattataggcgtgagttattatgtgtggtcgagaaggggggttttaagaggttttgagttttgttattttgatttgtttttttgttatagagggaatttggggtaaggaagggatgtattgtaattttttaatttattgttgttgatgttttgggtttttatgggtggtgggggttgtattttgtgtgtggtaggatgtttagtagtgtttttggtttttatttagtagatgatagaatttatttatttattttttattagttgttataaataaatatgattttagatattattgaatgtttttttgggaggaaaaaaattaatttagttgagaatcgttggggtattgtagaaagttgaaatatatttcgtggtggaaaaatgtttcgttttttattgtttttttttggaatttttttcgttttatttttatttttttgtttttgtttttttaaattttaaaattttttttagttattttattttttgttgatgaattcgttttttattttacggagagaatggtagtaatgggtagtaagcgggcgtattttttattattttgtttttttgtttattggtatttggacggtatatgtagtttttttttttgttagaattatatagtgttttatgttaggtttaggtgagtttttttttggtgtgttagattttattttatcgttaattggaggatttgattttatttattgtgttatagtttttgtgaaggtgtgtagatggagtttttttttaacgatttttttaggtaaaatttatttgtgatgaaatatatatatggtaagtgaatatttgttgaattttgaaggtatcgaaatttttgtgaagatatagaatatttttattatttaagaaagtttttttggagttgggcgtggtggtttgtgtttataattttagttataggaggttgaggtggaaggattattagaggttagaaatttgagattaggttgtgtaatattgcgagatttttgtttttattaaaaaaaagaaaaaaataatagttaagtgtggtggtgtacgtttgtaattttagttatttaaggggttgaggtggaagattatttgtatttaggagttttaggttatagtgagttatgaatatatttttgtattttagtttgggtgataaagagagatttttttttttaaagtaataataataatgaaaagagaatttttttttttatttttttttagttaattatgttttattttttgtgggtaattattgttttaggtttttttttttttttttgagatagggttttgttttgttttttaggttggagtgtagtggtgtgattattgtttattgtaattttgatttttttggtttaaatgatttttcggttttagttttttgagtagttggaagtagaggtttgtgttattataattggttaatttaaaaattttttgtagaggtagaggtttttttatgttgtttaggttgatttcgaatttttgggtttaagtaatttttttgttttagttttttagagtgttgggattataggtttgagttattgtatttagttttgttttagttttttttttttattattgatttatattttatataaatgaaaatttacggttgggtatggtggtttacgtttgtaattttagttttttgggaggttgaggcgggtggattatttgaggttaggaatttgagattagtttggttaacgtggtgaatttttttttttatgaaaaatataaaaattagttggatttgatggagggtgtttgtaattttagttagtcgggagtttgaggtaggagaattatttgaatttgggaggcggaggtggtagtgagttaagattatgttattgtattttagtttgggcgatagagcgagatttcgttttaaaaaaaaaaaaaagaaaagaaaatttatagtattttttttatatattaagtttgtttttgggaagtatacgtaatgtttttgagagttaattatgtgttatatatattagaagtttatttttttttattgtagagtagtatgttatcgtatatagatgtgttataatttgttttttattagttgatggaaatgtggattgtttttaaggtttggttattttgaataatatgtattatttttggtatatatgtatatgtttttgtggggatttatgtttcgtgtatttggatatatttgtgagtgtgattgttgggttttatgatgagtgtatatttataagaaatttttaaatttttttttaaagtggttgtgttatgtttttattttttgtgtgatttgtttttttttttttattgaatattttttataaagagttaataagttggtcgggtatggtggtttatgtttgtaattcggtattttgggaggttgagatgggtagattaatagagattaggagtttaagattagtttggttaatatggtaaaatttcgattttattaaaaatataaaaatagtttggtatggtggtgtgtgtttgtagttttagttatttaggaggttgaggtaggagaattgtttgaattcgggaggtagaggtcgtagtgagtcgagattatattattgtattttagtttgggtaatagagggagatt

SEQ ID NO: 45 - DNA, 15479 bp, Artificial Sequence
  chemically treated genomic DNA (Homo sapiens)
ttttatgttaatatgtatagagtttatttttttggataaataggtttttaatagtttttaatgttgaaaatataattttttagttgtaattataagtaatgattgattaatgggttattggtttatttagaaatgtgggtggtataaggattaataaagggaataatttgataatttttttttgttattttgtttattagtaatattaagataatatgttatatatgttttatttagttttatttgtatttttttatgtgtgtgttttaatttaaaaaaaatgtatataatgttaaattttttttttttttttttttttaaatattaatttaatgatttgggggattggttaatataatgttgagaatttggttgggtttttagaggaaaaattaatgataatatggggtttttttaagattaggttttttagaatttttaaattttgaattttatttatattgagtatttagtaatttgttaattatagtttaaatataaaattttaattttgaatttaaagtttaaatttttttattgtggtattggtggtttttgttttttaggttttgatttattaatttgtgattgtttgtatttattcggattgtgtgtttttaattttaggagtaaaagtttgttttgttattttattttttttattaatttaagaagagttgttaattttttgtttgtttagttttttttttgttgcgaagataggagtgatgatttttaagttttatttatattggattggaaattagatatatttataaatattttgtatagtagttaaaaggagaaaggagaagaaatacgtatttatgttattttttatgattgtataatgaattttgtaatttgtgtttttacgtagtgtttaattattgtttagggttatttttttttaatttaaggatatttttaagtatttgttaaagtttgttagtaataaatttttttatttgttgtatttttttaatttggagatagttgtttttttttttatttaaaaaaaaataaattatttgttttatataagatttttggttgatatttttttttagggagaaaatatttataaattatatatttgataagattaatatatagaatatataaataatttttataattaaatagtaaaaaattaaatagtttaattaaaaattggtaaagaatttgaatatatatttttttaaagaagatatataaatgaataattagaatatgaaaatatatttagtattattaattattagggaaattaagattaaaattataataagatgttattttatatatattaggatgaatagtataatagaagataataaatatagatgaagtggtggagatattgaaaattttgggtatagtttttaggaatgtaaaatggtgtaattattatgaaaaatagtatggtagtttttataaatattaagaaatagaattattatatgatttagtaattttgtttttgggaatatatttaaaagaattgaaagtagaattttagagatatttatatatttttatttgtagtagtagtatttataaaaattaataggtggatataatttaagtgggttaatagttttttgagtttttttttttttttttagtatttagaatatattattttattgttttttggttttcgttttttttaattataagtcggtcgttaatttttttggagttttaatttattgaatgaattattttttttatgttgtttgtaggattttttttttgtttttgttttttagtatttttattatgatgtatttgagtgtggatttttttgtatttattttatttggagtttattgaaatttttggatatatggattaatgtttttcgtgaaattttggaaattttatagttattatttttttaaatatgtttttgtttttttttcgttattgtattttatggtattttgattatatatatgttggtgtgtttagtgatgttttatatttttttgagattgtttgttttttttttttgtttttgttttttatgttgtataatttatattaagttattttatagtttattgattttttttttttttattttatatttattgttgattttttatagtgatttttaaaattttagttattgtaatttttaatttaaaattttatttttttataatttttattttattattgatattttttatttgttgagatattgttttatattttattttattttttttattatgattttgtttagttttttggatatatttataattaagttgttttatagtttttgttacgtttgatatttggtttttttataggtagttttagttgtttatttttttttttgtgttgggttatatttttttgtttttttgtatgttttattattttttggtgaaaattgtatattttagataatatattatggtaattatggttaatgatttgttttttttttttaattttttttgtttgtaattttatttgtttattgatttgataggattgattaatttagtgaaatatattttttttatagtgtaaagtttttgatattatttatttgagggtatggatttgggtgtatatatagttataatataacgatattggttttagtagggttgtttttgattttttttttgttttgtatttaaaattgtttgtttttgttggtattatatatagtttttgttgatttttagttgattgttttattgtttttaataatgttttggggtatatattattttaaaatttgatgtaattaaatttgggtttttttttaggaatagtttttgaggttagattttgagatttgttttggttttaagagggttttttttagttaatttttgtgttgatcgattttggtaaatttttagttagtttatggtttatttttttgtttttatagaattattagttttttattaattgtttattattaaaatttttattgttttaggtatttatttttggtgtttgtggttaattttttttagtgtggaatttttattttatgagaaagttgggatgagggtaattatggttcggggtaggtattatttttgttttataagttagggttggatggaggaggatatttttagattttttagttagttttgtttagaatagagtttttgtaatatgatattttgggggttgggtataagaaatgttggtagtttttttattttagggagatattgtagtttttatttgagagttagggaaagtgtttttggatttaattgtttagaatggggtttttgttacgttgatttggggattaggagaaagagtgagttatggtttaaatgttatagatttttattgtgtttattagtatttagtagattttttttaaataaaatttatttatttattgtatgtttttagaataatttttagggatttaaattattttagttttataaataatttttagtaattataattttttattaggaagaggttttgtggggttttttatgttgttattatggaagttatttttttgtattattttttaatgtaaaaaataaaaaggaaggagagatataataaatttgacgtttattgatacgggaatgagtaaataaattgtggtatagtaatagaatattatttatttattaaattaagtgaattagagttatatatattagttaggataaattttaaatatataatattgagttgtagaataattcgtgtaaaaatattatatataaatattagaaatattgtatggatgtataatagttgtagtaaaataggaaaatgtggattagaaggataaaagttaagttttgattagtatttttttttggattttagaaagagaataagagattttaatttttattttattttttgtttatatttgtaattttagtattttaggtggttgaggtgggtagattatttatggttaggagattgagattagtttgattaatacggcgaaattttatttgtattaaaaatataaaaattagtcgggtatggtggtatgtgtttgtagttttagttatatgggaggttgaagtagaagaatcgtttgaattcgggaggtggaggttgtagtgagttgaattttagtttgggcgatagagtaagattttgttttaaaaataaagaaataaaataaaatattgtaagtagaatatgtgattttatgttgagtatatgagtgtgtattatattatttttgagttatgttttatgtttttagttttattatttgtgaaatttaagtaggtatttattagatggtatgaaaggttggaatttggaggttttatagttttggggttttggagaggagtttaatagagtaaattagtaaggatcggaattaagatatttttttaataaatgttaattaagtatttattatggttgttgtttagtgttagtagttttggtgtagtgttttttaattttttagatatttttaaatataggatttcgtttagatgtgttttagaagggtggatttatttgtttattatatatttagtatttaatttttttgtttttttaatagtaagatgagattatcgagagttttttttttataattttgttaaaatgaaataataatttatgtaaagaggcggatgtgttgtttggtatatagtaagagtttaagaaatgttaggtattgttgttgttatcgttgtttattaggtatagttttaattataggagagacggtgattgaatcgaatagaggtttaaatgtttgtggcgtttttagtaaatttatgagttttttaaatagaaaagaaattgtttttagtttggttttttttgagatcggtgcgtgttttttcgggaatttagcgtttggtattttcgtagggtgttgcgaaggggcgggttgggaggcggggtacggttgggagcgaggcggggcggggatcgtcgtttgttgggatcgtcgtttgtttggatcgtagaagagtaggaggacgtttgagttatgttcgcggcgatgggttttttggcggttgttttttgggtagtggtttattttcggatttttttattgggtattgtcgtttttttgttcgttgttgatttttttaaaagacggcgtttaaagaattattcgtcggggttttggcgtttgtttttttttggtaattttttttttgtggatttcgagtagtcgtatttggaggtttagttggtaggagtgggagaaggtgtttagcgtgttttgattttaattttgttttgtagtataagggacgtttcggtaacgtgggtggggtgggggatgaagggtaggaagaggtgtggttaacgttggtaatttggtaaaatttattttgagttttattttttaatttattaattggtatgattttatttgtattttttagggatggaatattattaaatgtttattatttgtatgttgttatgttaaatattattggaatattttatttgtaatgtgattattttgtttttttttatatgattgtttttaaaaatgttatattttttttttgagaaattttattttttatatataaaatggtgataatattattttaattttgattattttttaattgagttatttttattatattaattgagttttttagttttaattttttttttttgtagtgtatttttattaagtaataattttaaaatgttttttttttgtttaaatttttgttaaacggtgtttagatttttgattgaattatttgggattttttttgatgtagttttttttcgtttttatataataattttttattagggtttttcgattttggtgattaagtttttttaagtttttttagatattaaattttattttaagaaattaatattggtttttttgttatttagtataggtaatttgttgagagataatagtgtgataagtgattatgaagattagataaaatagtgaatggttaatattgatatatagttggtatataataaatagtagtttttttttttttgtatatgtttgtagtattttaaatatatggttgtatattgtttttaaatattgatagataaagttttattattttatgggagaaatatttaattggtaatattaagtgatagaattagttatagaatgttaaaattaagtttttaaatttgtgtttttatttaattaatatgttgtttaatttttaagtatgtggagatttttttgttattatttttgttaattatttttagtttgattttattgtggttaaatattatattatgtataattttagtttttttaaatatgttaaggttgattaaatgatataagatatagtttattttgataaatgtgttatggaggttggaaaaaatatgtatttgattattgttgggtggaataattgatataaattattgttgggtgaagtaattgatattaatattaatttgattttattgggtaatgatattgtttggtttgtttatatttttgttgatttgttatttatttattttattaattattgaaagaagaatgttgaagttttaaaggatagttgagagtatttatttttttatttagttttagtagttttttttttatgtatttagaaattttgttgttttgtatatatatatttaagattattatgtttttttagtgaattgatttttttattttgtaatgttttttttaattttttataattttatttgtttaaattgtattttatttgatataatatagttataattttttttttgattagtatgtgtatggtatatgtatttttattttttaatttttaatttttttgtattattatatttgaaattagttttttgaaggtagtatatatttgggtttttttttttattttggtaatttttgttttttaattggtgaatgtagattatttatatttaatgtaattattgatatattaagatttgtttattattttattatttattttgttttttttgttttttatgtttttgtttttttttttttatttttttgtgaattatttgaatatattaaaaataattttatttttatttatttgaggtgttttttagtagttttgtttgtattatgttttataagtgattgttttaaggattacgatatgtagatgtagttgattgtagtttattagtgtaaaaattttattattttaagtgaaatatagatattttgtaattatttaggtttttttattttttttattttataattgttgtaagtgttatttttatatatattgagaattatattagataatattataattttgtttttgaatgttaaatgtaattttgaaaatttaagagaataatagtttattgtatttatttatttatttattttttttatttatttttttttatttttgatgttataagtttattatatttttttagatttgaagaattatttttagatatttttttagtgtaggtgtattggtaagaaatttttttagtttttttttatttaagaatgtatttattttatttttatttttgaagtatatttatattggatatagaattttaggttgataattttttttatttaatattttaaaagtttatgttttttttttttggtttttgtggtttttgttaagaaatttattgttatttgaattgttattttttatatgtaatgaatttttttttattgtttttttttaagaaattttttttgtttttgtttttgtttaatttttagaggtttagttatgatagattttggtgttattttttttgggtttattttgtttgggtttttgaaaatatagattttttttttgttagtttgagggagtttttgttattttttttttaaatattttttaattatatattttttttttttttttttttggatttttggatattgatggtataaatgttaggttttttgttgtgttacgagtttttgaaattttgtttttgttgtttttaatgtagtttttttgtgttgtttagtttgaatatgtttttttgagttgtttttaaatttatagattttgttattattattattttgttattgagttattttattgaattttaaaatttattttattgtatttttagttttaaaatttttatttggtttttttttattttttatttttttgttaaaatgttttaattttttgtttgttttgagattatttatagttattggaaaagttttataatagttgtttttaaatatttaattattttatatttttaatatttgtgttattttattgttggtgttaatttatttaattgatgtttttttgatttttggtaaggtgagtaattatggattatattttggatattttatatatttgttataagatttattttggatattatatagattttttattttagtatatagtttatttagattttgaatgtttatttttgtgggtggtagtttaaatattaatgtaggttataaagtttttgtagtgttattttggtttattttatttttattatttatttttataggagtttattttatatttttattagtgtaagttggggaaaaggaagatggaatagaagatagggatttttttggtatagtagtttatgttttattacggagggaagagagttagagatttgtttatattttttttaaggggaagtgtatttttttattattgtagaagaaggttggaaagtttaatttgttttttgatttttgtagggagtttttttattttagtttaggaatagaagtcgtaatttagtttatagatttagtagagaagggtattattttattattgtaaagtaggttgaaagataaggtattatttatgtattttagtgttataggattttttagagttgggaagggttaaatgttttttatggtatttgtttttataataaagaagtaaaaaggttaaatggtttttgttttgttgggtttttttttttttggttttttggttagagagagtagattttttttaaagatatttttgtttgtgttaattggtgttatgattaatagaagtaaaatggaatgtttttttttaattttatttggaataagaagtttgatttgtatttttgttgtatttttaagataggtgttaaaagaggggttaaatgatttgtttaatgttataaaattagttagtgataaaattgagattgggattttatttttggttttgtgatttttttattatattgttattatttatttttattttatataggtttgtatttttatgtttttgggtgtaaaataaatggagttaaattatgaaatttagttataattaaatttatatttttgtaattgggaaatattaagtattaattaatagattttatataagtatttttatgttagtttttattttatttttatgatgggtatataagttaggtatgatttggtggtgtttttattttattatggagtaaaatgattgagaacgaatagtgaattgttcgggttatttagttaaataataataaataaggatttgagttcgagattatttgatttgtatatttattgtgggatttggttagtagtttgtagtgtaatagggttttttttttgtttttaggtggatcggtaggtcgagaaataaaagatatatataagatagtgaaagttgggtttaggggggttacgattttttggatttgcgatgtcgttagtgcgttggatatattagtatttattattaagtttagtgaggatgggggtaggttagtgagggatttagggttgtttgattatgaggtgagatggttatatggggatgaagtaattttttaatattagtatgtagaagtatagtatatagagataagaatttataatatagtgtgtgtattagtaatttttaatagagttttagaatagaaatatagtttatttataatttatgattagtaagatattaattagtatggttaattttgttaaaaaaatcgtggtaagataagggcgtttataattttattttatttatgtgaataggtgttttttatgggtttatttataggttttttataagggttgtattttatttttagagttatgattatttgtttttttgggataggaattttggtgatgtgaaatttttttgattgtatgtttatttataggttttttatagggggaagtatattaggtattgttggtttattttggtagtttaatttggtattgtttttatataattttgtatgtaattttgtatttataataattaggagtattttattttttatttcgtaataatagttttagggggtttttttatatatatttattatttattttatgttgtttgattttttatgatatggttagaggataattgatgtatttatatgtttatttatttaatagatatttattaagtgtttattatatgttaggtaaaatataaggttgtatatgattaaatgtatattgtatatttttggtaattaaatgagatataaggagattggattattgaatggaaattttggggataattttttgtagaatgttggaagaaattgggttaaattttaaaggaaattttgatttttggtaagtggttaaatggagtaaagggatagaagatttttaataggggaaaatggtttgagttataataattttattattaattttagtattatgattatttattataataatattaaatatgggaattaataaagtttataaaatttggaaattaagatagagaaaagttaaataatttttttttaaattatatagaaattaagaagtagaatttggatttaaataagtttgtataattttaaaatttaaatttttaagtatttttttatattattttttttatttaaatattttagaattttgattgaaaattaaataagatttaaaatattatatttgatattaagattttttttagtttagtttagattattttgttagttttgttttttattttttttattaattgagaagatgttttttttaggagttttttttaattttggtttttttatgtggtttttaatttttttttattaaatattttattgtaaagaatgataataatgagaagtgattatttatttatatgttttattagattgttagttttttgaagtgaaggatttgttgtattttttagtatttggtattgatttgttatatggttagtgttttttaaataatgaattttatgttttagttagataaggtagtttttttgtttttaaatattttttgtattttttttttatatttgtatatggtgtttttattatttagaatgtttttgattttttattatatgttttttattattattgtggtttgggggttgttggtttttgtttgtttgttttttggtggtattttgatttttatttaagatttggtttagatattatttattttttaaaaagatattttttttatatttgtggtggaaaattatttttttttgcgatagttttatgtttttttttattagtataataatatatgttatttgttgtgtattttattttttttttgtatagttagttttttttaagagattttgatattttaggaatatattatattatattgatttttgtattatttttatgtatgatatgttagtgttagaaggtgtttggtaatttttaagtattttataaaagtttgttaaattgaatatgaatttaatttttatagtttgtttttagaaattagcgtagttttaagaattatttgtgagattattatttttggaaggagtttatgggttttagaggattggtaatttttgaaattgtatgtaaagttttttatgtgtatagttgtgtatgtgtttattagagattaggtttattatatatattatatttttaaaggattttataatttaaaaaagtaaagaattattgttttaaagttttattttttatttttttgtttatttttttttttttattggataaaaaagttttttgattgtaaaggtaataatatatatatagtgagataatatattaaaatatagtttaaggagagagagaattttatttgtttttgtgtttattttgttattattgtgtatgcgtgtatacgtgtatatgtgtatatatatatatatatttagcggtatttttataggattttggtggatatttttttagatttgtatgtaagtgaaaataaaattatatttttaattttttattagaaattttacgttattaatgagaaaaaagttgaatattttgatatagaaatgtttgaaagatataaatatacgattttaaaaatataatatttagattgagggatagatgttaaattttagagaaatatagaaatagtatgtatttttgtgttttttaggatttttttttttttttcgttgttatatatatttatagaggtatagtttaggggaatagattttttgatttattgttggtaggagtgtgaattagtatattttttttttgtttttttttttttttttttatgtttttgttttgttggttattaaatttaagaatttagatttagtggaatttttgtaaattttatattttttggtagttatggtttaatagtttagtttttttttttattaattttttatttttttttttttattgtaaatatttattttgttttatttttttttaaatgtttatgttatatttggaatttttatttttagtattatattttttgttttttattgtttttgtttgatttttatagattttgttttagtttttttttttttttatttttatttttgattttaagattgtttttgttttttaaaaggtattttatttttatttttttttgttttattttgttaaggttttttttttttcgtggtttatttaatgatatataattgaaaagtgtgttttgttttataaagtttttttagaggttttttgggttatttaatttttttaaagaaatggataaaatgattgatagggtgtacgtaagaattgttagatatcgttatttttattttagggtttttatttcgtgtttaaatagttgataatattatataagttttttatttagttttgtttaattcgaaatatgtagtggtagagagttggtagagataaaatttttaggaagtttattttagtaaatagtaatggagttttgaattttttttaagtataagttaagattttaggttgtatattttgttagttagaagttatttttaatttgagattttttagtttttttaaaaatatttttatttaatgttttaaattagttaagaaattttttttgttaggtttaagaagtttatttaggaatttagtaagggtatattaaaaaaattgtttaatgtgtatggttttattattgttattttttagaagtaaagatgtttattttaggagtaaattgatttgagattgaattttagttttgttttttttagtaagataggatatgttgtgtaggagataaggattgatggaggattttgggttaaaagaatataaggattgagtttaggtttggattttaatgtgggagtaaggtggtgggataagattgaatttattgtatttgtttcgatggggattattaggaataggattttaagaggaatatggtggagtgtaagtgtaaaggtatttggattgtggagaagaggttataaatatttaaaggaaatgaagtttttcggattgttattattgtttgtagttagatataatttaggtagaaaaaaggtaggggtagggtttatttgggattttttgttgaatagatatattaggaaggattttgattcgtgattatatattgttttttaatttatatttgtagatatttgtatatttgtgtatatttatgaatatatatatttttatttttttttttttttattttaatttttttatttttatttatttttatttttattttgttatttttattaaattttgttatttaggttttggagttattttgggtttacgtttttgtttttaaattttatataatgtttgggaaattttttgtattatttaatagttttgttatttttgttgtgttgttttagttataatttattttttgttttgaaagataagaattattattattgtaaggtggttgtgagattaatgagataaaatatgaaaggtgtttagtaatggttgtttatgattatgagtgttttttttttatatattagtgggtttttgttttttttgttattataagaatgtatttacggttttttgtatatagagtttttttatttttcggagattcgttgggtggttgtgcgtttggaataagaaaataaagtgttttttatattgttgtttttatttttttttatagaattttaagagagaggaataatttttttttttttatagttggggagttgaggtttaaaaaataaagtaattttcgtaagagtcgaaaacgattgaattatatagtttagattgttatataattttagagttcgagggtttttttttatgtttggtatttgttttaaaatgtatttcgtattatttagtatacgtttttattatttatgtttagtttaggaagggggtatttttatttggttaaatagatagttatgatttattaagaagtttatatttggtatattagattaatattaattatgttttagtttttttaagtggttgagatatgattagtgtttaggtgagaatttagatgtgttgaattttttttatttattagattttaggatgtttggggttagaaattttgtttattatgtttatatattgagataggtttttattttgttatttaagttggagtgttatggtacgattatggtttattgtaggtttaaatttttaggtttaagtgatttttttattttagttttttgagtagttgggtttataggtatgtattattatatttagttaatttttatttttttgtaaagatagggttttattatgttgtttagattggtttcgaattttttggtttaagtaatttgtttatttcggttttttaacgtgttgggattataggcgtaagttattgtatatggttagaatttatttattttattatagttttatttttatgttttgttttagggatatatgatagatgtttatttagtttatgttggttgaatatataaatagatatttataaagaaatatttatattttgaagtgaattgaatttgagttttgttgagagaaggagaaaaggaaataaaagtatttttatgagattaatgtatatttatttatatatatatatatatatacgtatatatatagatatagatatacgtattttttttaatatgattttttttagttatatatattttttatttttgaatatatggatatgtgtatatttaattgttacgatttaattattttttagt

SEQ ID NO: 46 - DNA, 15479 bp, Artificial Sequence
  chemically treated genomic DNA (Homo sapiens)
attgaaaaatagttaaatcgtaatagttgaatatgtatatgtttatgtgtttagaaatggaggatgtgtgtagttggaggggattatattgagaggagtgcgtgtgtttgtgtttgtgtgtgtacgtgtgtgtgtgtgtgtgtgtgagtgagtgtatattggttttatgggaatgtttttattttttttttttttttttttaataaggtttagatttaatttattttagaatgtgaatgtttttttataaatatttatttatgtatttaattaatatgaattgagtgaatatttattatgtgtttttagagtaaggtatgaggataaaattgtaataaaataaataagttttggttatgtgtagtggtttacgtttgtaattttaatacgttggggggtcgaggtaggtaaattgtttgagttaaggagttcgagattagtttgggtaatatagtgagattttgtttttataaaaaaataaaaattagttgggtatggtggtatatgtttgtggatttagttatttaggaggttgaggtgggaaggttatttgagtttgagagtttgagtttgtaatgagttatgatcgtgttatggtattttaatttgggtgatagagtgaaagtttgttttaatatatagatatagtaaataagatttttaattttaagtattttagagtttagtgaatagagagaatttagtatatttgaatttttatttgaatattaattatgttttagttatttaagaaggttgagatatgattagtgttaatttggtgtattaagtatggattttttagtaaattataattatttgtttaattaaatgagaatgttttttttttagattgggtatagataatagaaacgtatgttagataatacgaggtgtattttagggtaggtgttaggtatggaggaaagttttcgagttttggagttatgtgataatttgggttgtatagtttaatcgttttcggtttttgcggaagttgttttattttttgagttttaattttttagttataaaagggagaaaattattttttttttttaaggttttgtgaggaagaatgagagtagtaatgtgaaaggtattttgtttttttgttttaggcgtatagttatttagcgagttttcgaggaatgaaagagttttgtgtgtagagggtcgtggatgtatttttatggtggtaaaggggataggaatttattggtgtgtgggaagaaggtatttatggttataggtagttattgttaagtattttttatattttattttattaattttataattattttatagtagtaatagtttttattttttaagatagaaaatgaattatagttgaaataatatagtaaaggtgataaagttattgagtggtgtagggaattttttaggtattatgtaagatttgaggataaagacgtgagtttaagatggttttagaatttgagtgatagagtttagtgggagtgatagagtgaaagtaagaatgagtgagagtgagagagttggggtgggagagagggagaatggggatgtgtatgtttatgaatgtgtataagtgtgtaaatatttgtaaatgtaggttggaggatagtgtatggttacgaattaaaattttttttaatgtatttgtttaatagagggttttaggtagattttgtttttgttttttttttgtttgggttgtgtttagttgtaggtagtggtaataattcgaagggttttattttttttaggtgtttgtggttttttttttataatttagatgtttttgtatttatattttattatattttttttagagttttgtttttaatggtttttatcggagtaaatatagtggatttagttttattttattattttgtttttatattaaagtttaagtttgaatttagtttttgtatttttttggtttagagttttttattagtttttattttttatatagtatgttttgttttgttaggaaaagtagagttgagatttaattttaagttagtttgtttttaaagtaagtatttttgtttttaagaaatggtagtaatgggattatatatattaagtaatttttttaatgtatttttgttgaatttttggatgaattttttaggtttgataagaaggattttttgattaatttaggatattaaataaggatgtttttggaagagttgaaaaattttaggttaaaaatgatttttaattagtaaagtatatagtttagaattttagtttgtatttgggagggatttagaattttattattatttattgaaataaattttttaagaattttatttttattaattttttgttattgtatatttcgaattaaatagaattagataaaaaatttgtatggtattattaattgtttaaatacggggtaggagttttgggatgaggatggcgatgtttaataatttttacgtgtattttgttagttattttatttatttttttagaaagattaaatgatttagagggtttttgagaagattttgtaaggtagggtatattttttaattgtatattattaaatgagttacgaaaaaaaaaaaattttaatagaataaaataaaaggagataaaaataagatgttttttgaaaggtaaaaatagttttaaaattagaaatgaaaatagaaaaagaaaagaattgaaatagaatttataaaagttaaataaaagtaataggagataggaaatgtaatgttaggaataaaaattttaaatgtagtataagtatttaaaaaagggtggaataaaataaatgtttatagtaaagaggaagaagtaaaggattagtgggagaagagattgaattattgaattatggttattaagagatataaagtttatagagattttattgaatttaagtttttaaatttaataattaatagaataaagatatgaaaagaggaaaagaaaaatagaaaaagagtgtattaatttatatttttattagtagtaggttagagggtttgtttttttgagttgtgtttttgtgagtgtgtgtgatagcgagagagagagagagattttaagaggtataaaaatgtatgttgtttttatatttttttgaggtttaatatttgttttttaatttggatgttgtatttttaaagtcgtatgtttatgttttttaaatatttttgtattaaggtatttaattttttttttattgataacgtggaatttttaataaaaagttggaaatataattttatttttatttatatataaatttggaaagatatttattaaggttttatagaggtatcgttgagtgtatgtgtgtgtgtgtatatgtgtacgtgtgtacgtatgtatagtggtggtaggataggtataaagataggtaagattttttttttttttaaattgtattttaatatgttgttttattgtgtatgtattgttgtttttatagttaaaaagtttttttatttaataaagaaaaaaaaataaataaggaaatgggaaataaagttttaaaatagtggttttttatttttttgagttatagaattttttgaaaatataatgtatatgatagatttgatttttagtaaatatatatatagttatatatataaagagttttgtatgtagttttaggagttattagttttttggggtttatgaattttttttaagaataatggttttataggtagtttttggggttgcgttggtttttgagaataggttgtggagattaaatttatgtttaatttaataggtttttatgagatgtttaagagttgttaggtattttttggtattggtatattatatatggaggtaatataaagattaatatgatatgatgtgtttttaaagtgttaaagttttttgggagagattgattgtgtagaaaaaaaatggaatgtatagtagatgatatgtgttattatgttgatagagagggatataaagttatcgtaagaagagatgattttttattatagatataagaaaaatatttttttaaagagtagatggtatttgagttagattttaaatgaaagttaggatgttattaaaaaatagataaataaaaattaataatttttaaattataatgataataaaaaatatgtagtaagaaattaaaggtattttagatggtgagaatattatatatagatgtaaaggggaaatgtagaaggtgtttgggagtaagagagttattttgtttgattgaagtatagggtttattatttaaagagtattgattatgtggtaggttaatgttaggtgttggggagtgtaataagttttttattttaagaagttaataatttaatggagtatatagataaataattattttttattattattattttttataataaaatatttgatgggaggaagttaagaattatataagaggattagggttgaggaaggtttttgggaaaagtatttttttagttgataagggagatgggagataaggttgataaggtaatttgagttaggttgaggagagttttaatattaggtataatattttggattttgtttggtttttaattagaattttaagatgtttgagtaggggaggtgatgtaagggagtgtttaagagtttggattttgaaattatataaatttgtttgaatttaggttttgttttttagtttttgtgtgatttgggagaaagttatttaatttttttttgttttagtttttaaattttatagattttattagtttttatgtttagtattgttgtgataagtaattataatattaaaattaataataaaattattatggtttagattatttttttttattaaaaattttttgtttttttattttatttagttatttgttaaaaattaaaattttttttaaaatttagtttaattttttttaatattttataaaaggttatttttagggtttttatttagtgatttaatttttttatattttatttggttattaagagtgtatagtatatatttagttatatatagttttgtattttgtttggtatatgataagtatttaataaatgtttgttgagtgaataaatatgtgagtatattaattgttttttaattatgttatgaaaagttaggtaatataaagtagataatgggtatatgtagggagattttttgaaattattgttacggaataaaagatgaaatgtttttgattattgtaaatgtaaaattgtatgtaggattgtgtaaagataatgttaggttgggttgttagaatgagttaatagtgtttgatgtgtttttttttgtagagagtttataaatggatatgtagttagggaggttttatattattaagatttttattttagaaaagtagatgattatagttttgggaatggaatgtaatttttgtggagagtttataaatggatttatgaggggtatttgtttatatggataagatagggttataaacgtttttattttgttacggtttttttggtaagattaattatgttgattaatattttgttaattataggttatggatagattgtgtttttgttttaaggttttgttagaaattgttgatgtatatattatattgtaaatttttatttttgtatattgtatttttgtatattgatgttaaagaattattttatttttatgtgattattttattttataattaaataattttaaattttttattaatttatttttatttttattaaatttaataataaatgttggtatatttagcgtattggcggtatcgtaggtttagaaggtcgtgatttttttggatttagtttttattattttgtgtgtattttttatttttcgatttgtcgatttatttgggaataaagaaagagttttgttgtattgtaggttgttggttagattttataataggtatataaattaaatagtttcgggtttaaatttttatttgttattatttagttgaataattcgggtagtttattgttcgtttttagttattttgttttatggtaaaatggaagtattattagattatatttaatttgtgtgtttattatgaagatgaaatgaaaattgatataaaaatatttatgtaagatttattagttagtatttaatgttttttaattgtaagaatgtaaatttaattataattaaattttataatttaattttatttgttttatatttagaaatataaaaatgtaaatttatataaaataaaaataaatgatgatagtgtgataagaaaattatagggttaaggatgagattttagttttagttttgttattggttagttttgtgatattaggtaagttatttaattttttttttaatatttattttaggaatataataaaggtgtagattaagttttttattttagataaggttgaaaaaaagtattttattttatttttattaattatgatattaattaatatagataaaaatatttttaagaaaagtttattttttttagttaaaggattaggaaaaggaaaatttaataggatagaaattatttagtttttttatttttttgttgtggaggtaaatattatgaaaaatatttgattttttttaattttaaaaggttttatagtattggagtatatggatagtattttgttttttagtttattttgtaataatgaggtagtatttttttttgttgagtttgtgagttgaattgcgatttttatttttaagttgaagtaaagaaattttttgtaggagttagagggtaaattaggttttttagtttttttttatagtaataaggaggtgtatttttttttggaggagatataggtagatttttgattttttttttttcgtagtaaagtataagttattatgttagagggatttttgttttttgttttattttttttttttttagtttgtattgatgagaatgtgagatgggtttttgtgggagtgggtaataaaagtggagtagattagaatagtattgtagaggttttataatttgtattgatatttgaattgttatttataaaagtgagtatttagaatttaaataggttatatgttaaaataaaagatttgtatagtatttagggtaagttttataataaatatataaaatgtttaggatatagtttataattatttattttattaagaattaagagaatattaattgagtgagttgatattaatagtgagatgatatagatgttagaaatatagaataattaaatatttaaaagtagttgttataaagtttttttaataattatgaatagttttaaaataaataaaaaattaggatattttaataaagaaataaaagataaagaagaattaagtgaaagttttagaattgaaaatataatagaataaattttaaaatttagtaaaatagtttaatagtagaatggtaatgatagtagaatttgtgaatttgaagatagtttagaagaatatatttaaattaaataatatagagaaattatattggaaataataaaaatagagttttaagaattcgtggtataataagagatttaatatttgtgttattagtatttaagagtttaagaaagagaggaaaaagaatgtgtagttgaaaaatatttgaagaaagagtggtagaagtttttttaaattggtaaaagagaaatttatatttttagaaatttaaataggataaatttaaagaaagtagtattaagatttattataattaaatttttgaaaattaaataaaaataaaaataaagaaaattttttgaaggaaggtagtgagaaaaagtttattatatatgggggataataatttagatgatagtagattttttaatagaaattatagaggttaaaaagaagaagtataaatttttaaaatgttgaatgaaaggaattgttaatttagaattttatgtttagtgtaaatatattttagaaatgaaggtgaaataaatatatttttagatgaaggaaagttaagagaattttttgttagtatatttgtattaaaagaatatttaaagatagttttttagatttgaaaggatatgataagtttgtaatattagaaatgaaaaaagataaatgaaaagggtaaataaatgagtaaatataatagattattatttttttgagtttttaaaattgtatttaatatttaaaagtaaaattataatattatttgatgtagtttttaatgtatatagagataatatttataataattatgaagtagagagggtaaaggaatttaaatggttgtaagatatttatattttatttgaggtagtaaaatttttatattaatagattgtaattagttatatttgtatatcgtaatttttagagtaattatttgtaaaatataatataaatagagttgttaaaaaatattttagataaataagaataaaattatttttaatatgtttaagtaatttataggaagataggaaaaggaaaatagaggtataaaaaataggaaaaataaaataaataataaaatggtagataaattttaatatgttaataattatattaaatataaatagtttatatttattaattaaaagatagagattgttagaatgaaaaaaaagatttaagtatatgttgtttttaagaaattaattttaagtataataatataagaaggttaaaagttaaagaatagaaatgtatatattatgtatatattaattagaaaaaaagttgtggttatattatattagataaagtatagtttaggtaaataaaattatgaagaattaagagggatattataggataaaaggattaatttattaagaagatatgataattttaaatgtgtatgtgtaaaataatagagtttttaaatatatgaaggaaaaattattagaattgaatggagaaatagatatttttaattgttttttgaaattttaatattttttttttagtaattgatagaataagtagataataagttaataaggatataggtaaattaaataatattattatttagtaaaattaaattgatattgatattaattattttatttaataataatttatattaattattttatttaataatagttaaatatatattttttttagtttttatggtatatttattaagatagattatattttgtgttatttaattaattttaatatatttaaaagaattgaaattgtatatagtatgatgtttgattataatggagttaaattggaaataattaatagaaatgataataagaaaatttttatatatttggaaattaaataatatattaattaaataaggatataggtttgggggtttagttttaatattttgtggttaattttgttatttagtattattaattgggtattttttttataaagtgataaaattttgtttattaatatttgagggtaatatatagttatgtgtttaaagtattgtaggtatgtgtagggaaaggggaattattatttgttatgtattaattatatgttagtattgattatttattattttatttaatttttataattatttgttatattgttgttttttagtaagttatttgtgttgagtggtaggaaaattagtattggttttttgagatagggtttgatgtttgagagaatttgaaagaatttggttattagagtcggggagttttgataggagattattgtatagagacggaaagaagttgtattaagaagggttttaggtggtttagttaggagtttgaatatcgtttggtaaaaatttaagtagaggaagaatattttaaaattattatttagtgagagtgtattgtaagggaaggaggttgaagttggagggtttagttagtgtagtgggaataatttagttgagaaatgattaagattgaggtagtattattattattttatgtatgggaaatgaagttttttagaaagaaagtatagtatttttaaggataattatataaaagagggtaaggtaattatattataagtaaggtgttttagtaatgtttaatatgataatatgtaaatagtaaatatttaataatattttatttttagaaagtgtaggtggaattatgttagttaatgggttaggaaatgaaatttaaagtgggttttattaggttattagcgttagttatatttttttttgttttttattttttattttatttacgttgtcggaacgttttttgtgttgtagaatagagttagggttaggatacgttaggtatttttttttatttttattagttgaatttttaggtgcgattgttcgaagtttataaggaagaagttgttaaggaagggtaggcgttagggtttcggcgggtagttttttgggcgtcgttttttgagaaagttagtagcgagtagaaaggcgatagtgtttagtaggagagttcgaggatggattattgtttagagggtagtcgttagagagtttatcgtcgcgagtatggtttagacgtttttttgtttttttgcggtttaagtaggcggcggttttagtaggcgacggttttcgtttcgtttcgtttttagtcgtgtttcgttttttagttcgttttttcgtagtattttgcgaagatgttaggcgttggattttcgggaggatacgtatcggttttagaaaaggttaggttaggagtagttttttttttatttagaaagtttatgggtttattgagagcgttatagatatttgagtttttgttcggtttaattatcgttttttttatgattggaattgtgtttggtaaatagcgataataatagtagtatttaatattttttgggtttttattatatgttaggtagtatattcgtttttttatatagattattattttattttgataaaattatgaaggagaagttttcggtagttttattttgttgttgaggaaatagaaaagttaagtattaagtatgtggtgaataaataaatttatttttttgaaatatatttaaacgaggttttgtatttgaaagtgtttggaagattaaaaggtattatattaaagttgttagtattgagtagtagttataataagtgtttaattaatatttgttgaaggaatgttttagtttcgatttttgttggtttgttttattaggtttttttttaaagttttaagattgtgggatttttaggttttagttttttatattatttggtgagtgtttgtttgggttttataaatggtgagattgaaaatatgaaatatagtttaggaatagtatagtatatatttatgtatttaatatagagttatatattttgtttataatattttattttatttttttatttttgagatagagttttgttttgtcgtttaggttggagtttagtttattgtaatttttatttttcgggtttaagcgatttttttgttttagttttttatgtagttgggattataggtatatgttattatgttcggttaatttttgtatttttggtatagatggggtttcgtcgtgttggttaggttggttttaattttttgattataggtgatttgtttattttagttatttaaagtgttaggattataggtgtgagtaagaaatgaaatgagagttgaagttttttgttttttttttaaggtttagagagaaatattagttagagtttagtttttatttttttagtttatatttttttgttttattatagttgttatgtatttatataatatttttaatatttatatatgatatttttatacgaattattttataatttagtattatgtgtttgagatttattttgattgatatatgtggttttaatttatttaatttaatagatggatagtattttattattatgttataatttatttgtttattttcgtattagtggacgttaggtttgttatattttttttttttttttattttttgtattaaagaatgatgtaggggaatgatttttataatggtagtatgagaaattttatagaatttttttttagtaaaaaattgtgattgttaaaaattatttataaaattaaaataatttaagtttttgaaaattgttttaaaggtatatagtaaataaataaattttatttaagaagaatttattaaatgttagtaaatatagtaagagtttgtggtatttgagttataatttatttttttttttagtttttagattaacgtgatagaaattttattttagatagttaaatttaagaatattttttttagtttttaaatgaaggttatagtatttttttgagatggaaaaattgttagtattttttatatttagtttttagaatgttatgttgtagaagttttattttaggtaagattggttaagaggtttagggatatttttttttatttagttttgatttgtaaggtagaaataatatttatttcgggttataattgtttttattttagtttttttatgagatagaggttttatattgggagaggttagttataaatattagagatgaatgtttgaaataatagagattttggtggtaagtaattaataggaggttggtaattttatgagaataagaggataaattataggttaattagaagtttattaaagtcggttagtataagagttagttaggaagaatttttttgggattagaataaattttaaagtttggttttaaagattatttttgagaagaagtttaaatttaattgtattaaattttgaagtaatgtatgttttaaggtattgttgaaaatagtagagtaattagttggaagttagtagagattgtgtgtaatattaataggggtagatagttttaaatatagaatagagaaaaagttaaagatagttttgttaaaattaatgtcgttgtattgtgattgtgtgtatatttaagtttatgtttttaggtaagtgatgttagaggttttatattgtggggaaaatatgttttattaaattagttagttttgttaagttagtaaataaatgaaattataaataaaaagaattgggagagaagagtagattattagttataattgttataatatattatttaaaatgtatagtttttattaaaaaatgataagatatgtaaagaagtaggaaagtgtgatttagtataggaaagaaagtaggtaattgaaattgtttgtgagagagttagatgttaaacgtagtaaagattgtaaagtaatttaattataaatatgtttaaagaattaaataaaattatggtgaagaaagtaaagtaaggtatgagataatgttttaatagatagaggatattaataatgagatagaaattataaaaaagtggaattttgaattgaaaattgtaataattgaaattttaaaaattattataggggattaatagtagatgtaaagtagaagaggaaagaattagtgaattgtaagatagtttgatatagattatgtaatatagaaaatagagatagaaaaaaagaataaataattttagagaaatgtgggatattattaaatatattagtatatatgtaattagaatattatagaatataatggcgagaaaagagtagaaatatatttgaagaaataatagttgtaaaatttttaaaattttacgaaaagtattaatttatgtatttaaaaattttagtgagttttaagtaggataaatgtaaaggaatttatatttaaatatattatagtaaaaatattgaaagataaagataaagaggaaattttgtaagtagtatgagagaaatagtttatttagtaagttggaattttaaaaagattaacggtcgatttgtaattagagaaaacggagattaaaaggtagtaggatgatatattttaagtgttaaaagaaaagaaaaaaatttagaaaattgttaatttatttgagttgtgtttatttgttggtttttgtgaatattgttgttataaatgagggtgtgtaaatatttttgagattttgtttttaatttttttgggtgtgtttttagagatagagttgttggattatatggtagttttattttttaatatttgtaggaattattatgttgttttttatagtgattatattattttgtatttttagaagttgtgtttaagatttttaatatttttattattttatttgtatttgttattttttgttatattatttattttaatatgtgtaaagtagtattttattgtgattttgattttaatttttttaataattagtgatgttaagtatatttttatgttttggttgtttatttatatattttttttggaaaaatgtgtatttaggttttttgttaatttttaattgggttgtttaattttttattgtttaattatgggagttatttatgtattttgtatattaattttattaaatatatgatttgtgaatgttttttttttaaaaaaaagtgttagttaagaattttatatgaagtagatggtttatttttttttaaatgaaggaaaaaatagttatttttagattaaaaaaatataataaatgagagaatttattgttagtagattttaataaatatttaagaatgtttttagattgaaagaaaatgattttaggtagtaattagatattacgtggaaatataaattgtaaagtttattatgtaattataaaagatggtataaatgcgtatttttttttttttttttttttaattgttatataaagtatttgtaaatatgtttggtttttagtttagtgtgaatggagtttggaagttattatttttgttttcgtaataagaaaaaagttgaataaatagaaagttaataattttttttagattgataagaaaagtaagataatagggtaaatttttatttttaaaattagagatatataattcgggtaaatgtaaataattataggttaatggattagagtttagggagtagaaattattagtattatagtaggaaaatttaaattttaaatttaaaattgaaattttatatttaagttgtaattgataaattgttagatgtttagtgtgaataagatttagagtttagaaattttggggagtttagttttagagggattttatattattattagttttttttttgggagtttaattaagtttttagtattgtattaattagttttttaaattattgagttgatatttaaaaaaggaagaagaaaaaaagtttgatattgtgtatattttttttaaattaaagtatatatatggaaaaatataagtgaaattgagtagaatatatataatatattgttttagtattattagtgggtagaataatagagagaaattattagattattttttttattggtttttatgttatttatatttttgaataaattaataatttattaattaattattatttgtgattataattaagaagttatatttttagtattaaaaattgttgaaaatttgtttatttaaaaaagtgaattttatatatattaatataaaa

SEQ ID NO: 47 - DNA, 8943 bp, Artificial Sequence
  chemically treated genomic DNA (Homo sapiens)
gttttggttattatttatttagaaggtttgagttgtattgttagttttttattaattttgtgtgtttttgggtaaggttgggtttatgttaaaagattatgattttgggttttttagttatagaatttatatatgaattttggttttgttagagtaattagtgacgtaattttggatgggttagttaatttttttgtggtttagtttgtttatttgtaaaatagggattataataatattaatattatgggttgttagatagattgaattagttaatgtagggtaaatatttagtatgatacgtatttattattatttttttgagtaaaagttgagtgtgagtgggtgtgagaatgtgtgaaatttttttattgtaattttagttaagaaatttatttataatttaaagtttagggtttaaatgggtggttatttttttttagttgtattttattttatttttgttttttttttgtttgtaggagttgttggtttttgattgggttggaagatttggtggattttaagtgatttataagagaatgagaatagaggatagggaatgtttttaaaatttttagagggatatagaggttgagaggtaggtagttttgtaggggttttttgattgggataaggaggattttggtttttataggttaattttggttaattttttttatggatagatgaggaaatagatttaggaatatttaaggttttatattttttatttgttaagttttgttgattttgttgtatttatgttttttaaagagagagagagtttaaggaaagaaagaaggattaattgtgtttgatattattgggagtttaagtaaagggtttttttattttatagtattttttttaatttgtaatttagtattatttttgttattgtttagtatttttttgttttattagagagatagttttattaggataaggattttgattttttaatatttagtgtttgttatatgttttgaatatagtaggtatatagattaattaatatatagtggtatcgaagtgagatatttattttttttagtgtttagagtatatgtttatggatttgttattttttttaatattatttttaagtatgaggttcgaaagtattgttaatttttttttttagttattaaaatttaaaggttaggtgtggtggtttttatttgaaattttagaattttaggagatagtagtaggaggattatttgaggttaggaatttgagacgagtttgggtaatatagttagatattatttgtattaaaaattagttgggtatggtggtatatttgtagtattagttattaaggaggttgaggtaggaggattatttgaatttaggaggtggaagttatagtgagttataattatagtattgaattttagtttgagtaatagagtgagattttgttttaaaataattttaaaaataaataaataaaaataaaatttagatattacgtggttattttaatatgtaaaattaagtttttttttattgagaagaatggggatttgagagttgagttatagagagataatttgttttttttttttttttttttttttttggtttatatttttaagattatgatttgtgaaatttgaatttaatatataaattattttagagtaatgttgtttttgtttattacgagtaatttatttggttattggaagttagaataagttttttagaagagaggtattatttggattattaatataaaaggatgaaaatatcggagtgaaggtgttttttgtattattgagtttttggatagtttgtttatttatgttgatatttgagtttaatgtttttttgaatgttgagatttaattttgatttaatgaaattagattaagaaagaagaaacgttttttattgttgataaggatatgattttttttataattttatgattatttttttttagttgttttataattatttgtttatttgttttttttttatgtgtttagggtataaagttgattaagattaagaataatgtttgggagtataatattgatagtatagttttaaaaatatgatgaatgttttaatataggaaatgagtaggggagaggtaagtgttgtttgggtgtttttttaatgtatagtattttttttgatatagttagtgtagtttttagtaggtaagtttttatatgttagaagatgttattttttgtggaattaagtggtagaatatgtttttaattatttttttttgtagaataatattaattttattagttaggatagagtgttggttgtatttgaattttaagtaacgattagtttattattgttggtatagattttaattagttatattattttttgaagtttgtagggtaggtaaatttttattttagaataaaaattattttagttaagtaagtgttttagaggaaagaagaaaatataatcgtttttataagagttttgtttttaaaaaaataagaaaggttttttgtttaggtgagttaatgaagttgttgatagttattagatgatattggaatttttatttgttagaatgtgttttgtgtatttttcggtgtggtaatatagagagggagattttttagtaatgttattgatatggttagaaattgtatttttttttttttttgttgagatggagttttttgttttagaaaatttagggggtgttattgggagtaatttttgagataggaatacgaattttaattaatttttggttgtagttttgagttttattatttgttatagtgatgtttagtaaggaatggtaggtgtattagagtagtagaggatttaatatttttttttttgttaattttttataatattttattgtgattagtattagttgggaagttatttgtagttattgagttttagtttttatatttgtaaattggggatagtagtatggttttatttaatgtgtttagcgatcgattgaaaggagatagaaatgtattagaattttttggatttttattttattttttttggggattgttatttatttattcgtgtttgttttttgttgttttgacgttgttatttttttttttaggtatttttttgtagggttttattattttagggattttagagttatagtatatgtatatttttatttaagtatgtttatttgttttttgttttattaggttgtttttaaggaatatgtggttttcggtatatatttggtataatattgtatatgatatttatttatttggttttgaatttgataaggaatttggtatgatgtttatttgttgaggttaggtgtcgagtagttttggaggtttaggggttagagggatgggaaaaggtgtttttttggggtgagtattagtttttgtaggagtgttgaatttgagaaagaataaagagagaaggaagtgaataagtatagtttaaatattatttgtttttattgagttttaataattttgagattttgtttgttatggaatttattttttaggttaagtagatatagaatttgggtgtgagtgatgataatgagttgatataatttttatatttttattattgagattttttttattaggaatgggttatagggtttataggtggtagtaattgttattataggttttatttttattagtttttggtatttgttttttttttattagaaaattttttatttgttaaaaaggaagttatttgttttgaattttaattttatttttaagaggttgggattattttattggagtttttgatgttgtgtgatttgtagtgattattgttttattgttgttggttgaggtggtttgggttaatttggttatttgggtagttgtttttttttttttttttttttttattgtttttagatatgtagtatttttagagagaaggggttattttttggtaaagaatttgtttaattttttatttacggtaggatttttgaaagttatagaggaagaagtataaattgatgttattttattaagttattagttttattttatttatgttatgttttttttttaggggtttttttgttaatagaattatagaggataaatttgaaagtgtagagatagtagttgaggtatagttaagagttttggttgtattaatgatttaagaagatggagtggttattagaaagttagaggaagtgatatataggggtttagtaattttagttaagttaattttattagtttttttggtttttattgtgtgtatagtattttgatagggattagagttatgagagtgagtaagattagattatgtttttgaggagtttatttttgttaagggaaataggtttggaaatatataatggtggtaaagaggaaagaagataatagaattgtatgaaggggatggaaagtgtttaggggaggaaatggttatttttgtgtgagggggttggtgaggaaagattttaagagaaggttttgtttggttgggtatgaaaggatgtgtaggagttttttagggggtataggtatattttaggtataggtaaagatttgtaggtatggtttgttgggatgagttttaagtattttggaatgaggatagttatagagataagaggagagttaatagattttatgttaatggttttatttgagtttgtgataagaatttagaatttttggattttttagtaatattgattgagttgtgtatgattttatatagaatattaatttaatggaggttagtgagtggtgtgtgtgtgattatttgttaattgtcgaggtggagaagtttttttcgattgtaggtagagtacgggggttttgttattggttgtagttttagttttgtttttttttttagtatataaataatttaatagttttattgaattattgttgtgtagggtaggaaagttttatatatatagtttagtaaatagtagtacgttgttgaaaaaaagatttagaggagagagataaggaaggaaagtagtgatggattttattttaaatttggtcgtggaaatttggttttttttggttgttagtttgatatttttttatttgtgagtaattgtttaggttttttttttttgtttttttggatttggggtgttaattaggttttttttttttttatttgttttgaatagtaaaaaggatgtttaggttggtcgtggtggtttatatttgttattttagaattttgggatgttgagtaggtggattgtttgaggttaggagtttaagattagtttggttaatatggtgaaattttatttttattaaaattataaaaattagttgggtatggtagtgtataattgtagttttagttatttgggtggttgaggtaggagaattgtttgaatttgggaggcggaggttgtagtgaattgagattatgttattgtattttagtttgggtaatagagtgagattttattttaaaaaaaaaaaaagagaaaaaaaagaaaaaaaaagatttttaaggagaagtagtttaagtgttggatgttataaatatatagaggttatgatggatgttttgtagatttataaaggaataaataagtattttttttatttatttttagtggaaagaagggtttagggatagtattgattgaggataatttaatagataatggtttgtatttagtttattaaattagaatttggattttatatttttttttttaagttgtaggagaagagggtgaatttttttattagtgagattttggtattttagagtaggtggagagaagagttattttttattgtgtgtattggaggtttttcgtttgttatattttatttttaatttaattttatagttattaagagtaaggaattatggttatatggaaatagaaaatataaatttcgttttaatttttttatagaaaagttagtaatttagtgagttgtggtaatatagtttttatttattggtaatttaatatgaattggtgtggtttaaatttattttttttaaagttagatttttttggagatagattatttttagtatgttttttttgagtgataaaagagggttattagtttagtatttgtgataataaatgtgtataagataattttatttttttagaataatgttaggaatatgagtttaatgtataaatatatatttttaggataagattgtatatgtttttttaaaaatatttttttaagagtttattttaatatttttattttaaatatatttgtttagtaggttattttaaatttttagggttagaaagtaagtaagattgtgagttagtgatgatagtaaaagtatttaggtaggattaagatgaagtgagaaaatattttttatttttagggtagaattttaaatagatatttatgggttttggttttttagtggaggttatttgaaggataaatatgttggtattttatttgtttgaagtttggatataagggtattattagtgttattttgtgtgtggttggttatgttgtggggttgttattatagattttggtagttaggtagataatattttagttttagacgatgtcggtatagtttaggatttagaagttatagtgtagattatgttttttttaggtttatataattatatgtaatagatgatggatttttttgttagtttttttattgtaataaaaagtagtattattttattaaatagaggggagttggaaagaaattaaatagtttgttaagtatagtttttgttttgacgtggaattatgtgaatttagatatttatttagattttttttcgggggttaatgttgtttatatattaatttaatagtttgttttggtttgagagattatgtaatatgtagaaagtttagaagtagagattagtgttattgattttttatggttgtgataataaaggaaggaataggagtgggaaaatttaaggttattttggttgtggtagatggtgtatatatttttattaattattttggggtaaggatttaaatgtattattgggtttggttatgttgtttttgttgggttttttaaatacgagtttttatgttgttttttagttgtattttattatatattattagagttattggatttgtatagaatgtttggaatttatattgtttaatggttattttttaaagaagagaaaataaggttttaatttaattatttggaatattttatggttatttatgtggaatattttattttttgttattaataggaaggtatttggttattagaaggtgtttgttttttagttgaaagtatatatgaggtatatggatttatttatatatatcgtatttttgaattatatttttttaatttgtttgtttggggttaagtttgtgggattagtagatttatggttgaattgatggttggttattttttttattaatttttttgttttatttagttttttattttttagtaattttaaattgggaaggtttttagatatttagaatttttagttggggaagtttatatatggtttattaaagatgggttgtaagtaggtttgttatagggagtagtagttttgatgggtttttttatagagatagttgatgtgtagacgtaataaattgattgttttgtaattgattattttgaaaaaaaatgagtatgtttggttgtattagtttttttttttattgttataaaaaaaaattttagggtgggtaatttagaaaggaaagagatttaattggtttatggttttgtaggttttataggaagtatagcgatttttgtcgttagggtgtttttaggaaatttataattatggtagaaggtgaaaaagaagtaggtagattttatatgattggagtagaagtaagagagggtggggaggaggtgttatatatttataaattattagattttataaaaatttattgttaagaggatagtatttaagggggatggtgtgaaattatgagaaattgtttttaagatataattattatttattaggttttatttttagaattggggattatattttaatatgagatttgggtaggggtatagatttagattatattattggtattgtgtttattaggtggatattattagttggaaggttagattttataagaggaggaatgtttttgtttttagttgtgatttttttgtatagtgttatttaggaaaatatgagttaattattttttttaatagtttaaattaattagattttttgattatagagattgaggtgtagttaaaaggtgttcgtatttttacgaggttaatggaagtttggagtatagttgttaatttgtagaaataaggattttgtgatttttttaagatttttttgtgaatgatagtttaagaagggttagattttaaaatagggttagagtttagagtgaagggaaagtttaaaagtttttgagtaaattttaaagatagggttattataggtttttagtgattttttgtgattgagtggatgtagtgatgtaaaattttattattattgtagaagataaaagaaaaattgttattttttttatttaggatgagaattttaaaattagggaagagtttatttattaaaaagatatgagggaatgaagtgtttggaagaattcgtttttgaattttttaggattatttatatttgagaatatttattaaatatttattttagattggggttatgaagattttagttgtttttagttaattattgtaattttttggtgttttatggtggaagtatgaaaggatttgatgaataaatataattattgtcgttagagttattgttattttttattgttttaatgttattttttttgtttgattattttagttttttagttagtgatttattagtttttatatttataaagttataatttttgagatttgatttttgttttattttgtaga

SEQ ID NO: 48 - DNA, 8943 bp, Artificial Sequence
  chemically treated genomic DNA (Homo sapiens)
tttataaagtgaaataaaaattaggttttagggattgtgattttatagatataggggttggtgagttattgattgaggaattggaatgattaggtaaaggaggtaatattaaggtaataaaaaataatagtaattttgacggtaatgattatatttgtttattaggtttttttatgtttttattatgagatattaaaaagttataatgattagttaaaagtagttgaagtttttatggttttagtttgggatgaatatttgataaatgtttttaaatgtgaatgattttgagaggtttaggaacgaatttttttaggtattttatttttttatgtttttttagtaagtggatttttttttgattttgggatttttattttaggtagaaagagtgataattttttttttgttttttgtagtgatgatgagattttgtattattgtatttatttagttatagggggttattgagagtttatggtgattttgtttttagaatttgtttagaggtttttaagttttttttttattttaagttttgattttgttttaggatttggttttttttaaattgttatttatagagaggttttggaggagttatagagtttttatttttatagattgataattgtgttttaggtttttattggtttcgtagaagtgcgagtattttttagttatattttagtttttgtggttagaggatttgattgatttgagttattggggaggatgattgatttatatttttttgaatgatattgtgtagaagaattataattaagaataaggatatttttttttttgtggaatttagttttttaattggtgatatttatttgataagtatagtgttagtgatatgatttgaatttgtgtttttatttaaattttatgttgaaatgtaatttttaattttggaagtggggtttgatagatggtggttgtattttagaggtagttttttatggttttatattattttttttgggtgttgtttttttgataatgagtttttatgagatttggtggtttataagtgtgtggtattttttttttatttttttttgtttttgttttagttatgtaagatttgtttgttttttttttattttttgttatgattgtaaattttttgagggtattttagcggtagaagtcgttatgttttttgtagagtttgtagaattatgagttaattaaattttttttttttttaaattatttattttgagatttttttttatagtaatggaagaaaagattaatatagttagatatgtttatttttttttaaggtgattaattataaagtagttagtttattgcgtttgtatattaattgtttttgtaggaaaatttattaaggttgttgttttttatagtaggtttgtttgtaatttatttttgatgggttatgtatggatttttttaattggggattttggatatttgaagatttttttagtttgaggttattgaggggtggaagattggatgaagtagaaaagttgatggaagaggtagttagttattaatttaattatgaatttgttagttttataagtttggttttagataggtaaattaggaaaatgtggtttaaaagtacggtgtgtataaatggatttatatgttttatatgtgtttttagttgaaaggtaggtattttttaatggttaggtatttttttgttgatagtaaaagatggagtattttatataagtaattataaaatgttttagatagttgaattaagattttgtttttttttttttaaagggtagttattaagtagtataggttttaaatattttgtataaatttagtgattttgataatatgtggtaaaatataattaagaaatagtatggaggttcgtgtttggagaatttagtagagatagtatagttaggtttaatagtgtatttggatttttgttttagaatagttagtggaagtgtgtgtattatttattataattagggtggttttgggtttttttatttttgtttttttttttgttgttatagttatggaaaattaatggtattaatttttgtttttaaattttttatatgttatatgattttttaggttaggataaattattgagttaatgtgtgagtagtattggttttcgaggaaagatttaggtgagtgtttagatttatatgattttacgttaaggtagaggttgtgtttggtaaattgtttagtttttttttagtttttttttgtttggtagagtaatgttgttttttgttataatgaagaggttaatagaaaaatttattatttattgtatgtaattgtataggtttaagaagggtatggtttatattatagtttttgaattttgggttgtatcggtatcgtttaaggttaaggtattgtttgtttgattgttagaatttgtagtgatagttttataatatggttagttatatatagagtgatattgatggtgtttttgtgtttaggttttaagtagatgagatgttaatatgtttgttttttaagtgatttttattagggggttaggatttatgaatatttatttggagttttattttgagggtaaggaatatttttttattttattttgattttatttggatgtttttgttattattattggtttatagttttgtttattttttagttttgagagtttaggataatttgttaagtaggtgtatttgaaatgggggtattaaaataaatttttgggaaagtatttttaaaaagatatatgtagttttgttttagagatatatatttgtatattagatttatatttttgatattattttggaaaggtgaggttattttatatatatttattgttataaatattgaattaatagtttttttttattatttagaaggaatatgttggaaatagtttatttttaaaaaaatttggttttaaaaaggatgaatttaagttatattaatttatgttaaattgttagtagatggaaattatgttattataatttattgaattgttaatttttttgtgaaagaattaaaacgaggtttgtattttttgtttttatgtgattatgattttttatttttaataattgtgaaattgagttagaagtaaaatgtgataggcgggaagtttttagtatatatagtagggagtgatttttttttttatttgttttaggatgttaggattttattggtgagaagatttattttttttttttgtaatttaaagggaaaaatgtaaaatttaaattttggtttggtaagttgggtataaattattgtttattagattatttttaattaatgttgtttttaaatttttttttttattaaagatgaatgggggagatgtttatttatttttttatagatttgtaaaatatttattataatttttatatgtttgtagtatttaatatttaagttatttttttttgaaaattttttttttttttttttttttttttttttttttttgagatggaattttattttgttatttaggttggagtgtagtggtatgattttagtttattgtaattttcgttttttaggtttaagtaatttttttgttttagttatttaagtagttgggattatagttatgtattattatgtttagttaatttttgtaattttagtagagatggggttttattatattagttaggttggttttgaatttttgattttaggtagtttatttgtttagtattttaaagttttgggatgataggtgtgagttattacggttagtttgaatattttttttgttatttaaaatagataagggaaagagaggtttgattagtattttaagtttaaggaaatagagaagaggagtttgaatagttatttatagatagaggagtattaggttgatagttaggagaagttaggtttttacggttaagtttgggatgagatttattattattttttttttttattttttttttttgagttttttttttagtagcgtgttgttgtttgttgggttgtgtgtgtggagtttttttgttttgtatagtagtgatttagtgaggttgttggattgtttatatgttggagaaggaggtagggttggagttgtagttagtagtagggttttcgtgttttgtttgtagtcggaagaggtttttttatttcggtagttggtaaataattatatatatattatttattgatttttattgagttaatattttatgtagaattatatataatttaattaatgttattggggagtttaagggttttgggtttttattataaatttaagtggagttattggtataaaatttattaattttttttttgtttttatggttgtttttattttagaatatttgaaatttattttaataagttatgtttatagatttttatttatgtttggagtgtgtttgtgttttttagaagatttttatatatttttttatatttagttagatagagtttttttttagagtttttttttattaatttttttatatagaagtaattatttttttttttgggtattttttattttttttatgtagttttattgtttttttttttttttattattattgtgtgtttttaggtttgttttttttagtagaggtgagttttttaagggtatagtttggttttatttatttttatggttttggtttttattagggtgttgtatatatagtggggattagaaaggttggtggagttgatttggttgagattgttgggtttttgtgtgttattttttttgattttttggtgattattttatttttttaggttattaatatagttagagtttttggttgtgttttagttgttgtttttgtatttttagatttgttttttgtgattttgttggtaagaggatttttaaaaaagagatatggtatggatgagatggagttgatggtttagtggaatagtattaatttgtgtttttttttttgtagtttttaaaagttttgtcgtagatagaaagttagataggttttttgttaaagagtggttttttttttttggaaatattgtatgtttggaaatagtaggggagaaagaagagaagagaatagttgtttagatggttaggttgatttaaattattttagttagtaataatggggtagtggttattgtaggttatatagtattaaggattttaatgaggtggttttagttttttgagggtggaattggaatttaaagtaaatggttttttttttgataagtggaggattttttaatgggaggagagtaggtgttaggagttggtagagatgaggtttgtaataatagttgttgttatttgtgagttttgtgatttatttttgatgggagagattttagtgatgagggtgtgaaaattatattagtttattattattatttatatttaagttttgtgtttgtttggtttgagaaatggattttatgataaataaaattttagagttgttaaaatttagtagaaatagatgatgtttaagttgtgtttgtttatttttttttttttttatttttttttaggtttagtatttttgtagaaattgatatttattttagaaagatatttttttttatttttttggtttttaagtttttagggttgttcggtatttggttttagtaggtgaatattatgttagattttttgttagatttaaggttaagtgggtgaatgttatgtgtagtgttgtgttaggtatgtgtcgggagttatatgttttttggggatagtttagtgaagtaggagataaataaatatgtttggatggaggtatgtatgtgttgtaattttggaatttttggaataatggagttttatagagaggtatttaagaaaagaagtgatagcgttaaagtaataaaggatagatacgggtaggtgggtgataatttttaggagaagtaggataaaagtttagggaattttggtatatttttgtttttttttagtcggtcgttgagtatattaaatagggttatgttattatttttagtttatagatgtagaaattgaggtttagtgattgtaagtagttttttaattgatattgattataataaaatattataaaaagttaataggaagggagatattaggttttttgttgttttggtgtatttgttattttttgttaagtattattatggtaaatagtaagatttaaggttgtaattagaaattggttgagattcgtgtttttgttttaagggttatttttagtggtattttttgggttttttagaataaaggattttattttagtagggagaaagaaagatgtagtttttgattatattaatggtattgttggaggatttttttttttatgttgttatatcgagaggtgtatagaatatattttgataagtaaagattttagtgttatttgataattattaataattttattagtttatttaaataaagagttttttttatttttttagaaataaaatttttatggaaacgattatgttttttttttttttttaaaatatttatttggttaagatgatttttattttaagatgaagatttatttgttttataaattttaggaggtggtgtgattggttggaatttatattaatagtgatagattaatcgttgtttggaatttaaatgtagttagtattttgttttaattaatgaaattggtgttgttttgtaaaggaaaataattgaaggtatgttttgttatttaattttatagaaagtaatattttttaatatgtagggatttgtttattgagagttgtattgattgtgttaaggaagatattatgtattggaagaatatttaagtaatatttgttttttttttatttattttttgtattaaagtatttattatgtttttaaagttgtgttgttagtattgtgtttttagatattatttttggttttggttaattttgtattttaagtatatggagaagagataaataagtagataattataggatagttaaggaaaaataattataaaattgtgagaaaaattatgtttttattaataatgaaagacgtttttttttttttggtttggttttattggattaaagttaaattttaatatttagagaagtattaggtttagatattagtatgagtggataggttgtttagggatttagtgatgtaaggaatatttttatttcgatatttttatttttttatattggtagtttaagtggtattttttttttgggaagtttgttttgatttttagtggttaagtgaattattcgtggtaggtagaagtaatattgttttggaatgatttgtgtattagatttaaattttataggttatgattttgaggatgtaaattaaaaaaaaaaaaaaaaaaaaaaaagatagattatttttttgtaatttagtttttaagtttttattttttttagtaggggaaaatttgattttgtatgttggggtgattacgtggtatttaagttttgtttttatttatttatttttgaaattgttttgaggtagggttttattttgttgtttaggttggagtttagtgttgtggttatagtttattgtagtttttattttttgggtttaagtgatttttttattttagtttttttagtagttggtattataggtatattattatgtttagttaatttttagtatagatggtgtttagttatgttgtttaggttcgttttaaatttttggttttaagtgatttttttgttgttgttttttaaagttttgagattttagataggagttattatatttggtttttaagttttggtggttggaggaggggattagtaatgttttcgggttttatgtttaggggtggtgttgaggagagtgataggtttatggatatgtattttaggtattggaggaggtaggtgttttatttcgatgttattgtatgttggttagtttgtatgtttgttgtgtttagggtatgtggtaagtattaaatattaaagaattaaaatttttgttttgatgaagttatttttttaataggataaagagatattaaatagtgataaaaataatattgaattataaattgggaaaaatgttatgaagtaaaagaattttttatttaagtttttagtgatattagatatagttgatttttttttttttttttaaattttttttttttttgaaagatatgaatataatagaattaataagatttgatagatgggaagtgtgagattttggatatttttggatttgtttttttatttgtttatgggggaaattgattagaattggtttatgaagattaaggttttttttgttttaattagaagatttttgtaggattgtttgttttttagtttttgtgtttttttaggagttttgaagatattttttgttttttatttttatttttttatagattatttagggtttattaggttttttagtttaattaaagattaatagtttttataggtaggagaagagtaaaggtgggataggatgtaattgggagaagataattatttatttaggttttgaattttaaattatggatgggttttttaattgagattgtagtgaaagggttttatatatttttatatttatttatatttagtttttatttaaggaaatgatagtgaatacgtgttatgttaagtatttattttgtattaattgatttaatttgtttaataatttatggtattgatgttgttatgatttttattttatagatgagtaaattaagttataggaaggttaattgatttatttaaggttacgttattaattgttttagtagagttaggatttatatgtagattttgtagttggagagtttagggttataattttttgatataagtttagttttgtttaaggatatatagagttagtggggaattagtaatgtagtttaggttttttgaatgggtagtggttagagt

SEQ ID NO: 49 - DNA, 8327 bp, Artificial Sequence
  chemically treated genomic DNA (Homo sapiens)
aaagtaaatagataatttatagaatgggagaaaatattcgtaaattatgtatttgataaaggtttaatatttagaatttttaaagaaattaaataatttatttttttattatattttaagttttgagatatatgtgtagaacgtgtaggtttgttatattggtatagatgtgttatggtggtttgttgtatttattaatttgttatttatattaggtattttttttaatgttattttttttttaatttattattttagataggtttttatgtgtgatgtttttttttttgtgtttatgtgtttttattgttttatttttatttatgagtgagaatatgtggtgtttggttttttgtttttgtgttagtttgttgagaatgatggtttttagttttatttatgtttttgtaaaggacgtgacgttatttttttttatggttgtatagtgttttatggtgtatatgtgttatattttttttttttaatttattattgatgggtatttgggttggttttaaattttttttattgtgaatagtgttataatgaatatacgtgtgtatgtgtttttatagtagaatgatttataattttttgggtatatatttagtaatgggattgttgggttaaatggtatttttggttttagatttttgaggaattgttatattgttttttataatggttgaattaatttgtattttttttaatagtgtaaaagtatagggaaaagaaagagagattagattgttattgtggttatgtagaaaggaaagatataagagattttattttgaaaaagatttgtattttaaataattgttttgttgagatgttgttaatttgtagttttgttttaattattttgttttagttattttgatttaatttggagtttataaaaatatgtgttgtatgaaattaaggtttaagggatttaaggttgtgtaggacgtgttttgttaaaaaaatgtttataagtagtatatttggtaaaagttattattagtttttagttttaataaattaggggtataatgtattgcggaaagttatagggatttttgtttttgaaagttgggtattgtttaaggtttttttttatgtgatagtttgaaatatggtttcgtgggatgagaaagatttgattgttttttagtttaatattcgtaaagagtttgtgttgaggtggattagtaaaagaggaaagttttttgtagttgagatagaggaaagttattgttttttgtttgtttcgggaattgaatgttttggtataaaattcgattgtatatttgtttaattttgagataggagaaaaatcgttttatggtgggaggcgagatatgtttgtagtaatgttgttttattattttttatttcgttgagatgtttgggtggagagaaatataaatttggtttacgtgtatatttaagtatagtatttttttttgaatttaattatgatatagattgttttgtttatatgttttttgttgattttttttttattattattttgtttttttattatatttttttttgttgaaatattgaaaataataattaataaaaattgagggaatttagagattggtgtttgtgtaggtttttggtgtgttgagtgtcggttttttgggtttattgttgtttttttatattttgtttttgtgttttatttttttttttagttttttgttttattcgattagaaatatttataggtgtggaggggtaggttatttttttataaaagtatttttatttttttatattttttttagtatttgtggtttttagattttttaatgattgttattttaattggtatgagatggtattttattgcggttttgatttgtatttttttaatgattagtgatgatgagttttttttgttttgttttttggttatataaatgtttttttttgagaagtgtcgttttatattttttgtatattttttgatggggttgttttttttttgtgaattttgtttcggttttttgtagattcgcgatattagttttttgttagatggatagatcgtaaaaatttttttttattttgtaggttgtttgtttattttgatgatagttttttttgttttgtagaagttttttagtttaattagattttatttgttaattttggtttttgttgttattgtttttgatgttttggatatgaagtttttgtttatgtttatgttttgaatggtattgttgaggtttttttttaggttttttatggttttatattttaagtttttaatttattttgagttaatttttgtataaggtgtaaggaaggggttttagttttagttttttgtatatggttagttagtttttttagtattatatattaaataggaaattttttttttattgtttgtttttgttaggtttgttaaagattagataattgtagatatgtggtgttattttcgaggtttttgttttgtttttttggtttgtatatttgttttggtattagtattatgttgttttggttattgtagatttgtagtatagtttgaagttacgtagtatgatgtttttagttttgtttttttggtttaggattgttttggtaatgcgggtttttttttgttttatatgaaatttaaagaagtttttttaattttgtgaagaaagttaatggtattttgatgggaatagtattgaatttataaattattttgggtagtatggttatttttattatattgattttttttatttatgagtatggaatttttttttatttgtttgtgtttttttttattttgttgagtagtgttttgtagttttttttgtagaggtttttcgtattttttgtaagtggtatttttaggtattttattttttttgtagtaattgtgagtgggagtttatttatgatttggtttttgtttgttttttattggtgtgtaggaatgtttgtaatttttgtatgttgattttgtattatgagattttgttgaagttgtttattagtttaaggagattttggattgagacgatggggttttttaaatatataattatgttatttgtaaatagggataatttgatttttgtttttttatttgaatattttttattttttttttttatttgtttagaatttttaatataagtaaaaaataaataattttattaaagatatagatatttttttaaagaagatatatgagtagttaataaatattgaaaaaaatgttcgatattattaattaatagaaatgtgaatgaaaattatattttatataagttagaatggttattattaaaaagttttaaagtaacgtatgttggttaagttgtagaaaaaaaaaaattatgtgtatatattgtttgtggaaatgtaaattagtttcgttattgtggaaagtagtttggagattttttaaagaatttaaaatagaagtattatttgatttagtaattttaatgttagttatttatttaaaagaaaataagttgttttattaaaaagatatttttatttatatatttattatagtattattcgtaatagtaaagatatggtattaattttggtgtttattaatggtggattggataaagaaaatgtgatatatatatatagtggaatattaggtagttgtaaaaaaaaaataatgaaattatgttttttgtagtaaatggatgaattgggaggtaataattttaagtaaattaatatagtaatagaaaattaaatattatatgtttttatttataagtgggaattatatgttggatatttatggatataaatatgggaatgatagatattggggattattagaggggtaggtatagatatgagtaattattggaaatttgattaatatatattatatttattatttgagtggtagaattatttgtatttaaatttttagtattatataatatattagtgtaaaaaatttgtatacgtatttgaatttaaaataaaagttgaaattataaaaagaggaataaaaataatgtttatgtatagatatgtatgtaaaaatgttagggagggttaatttatagtaatagttattatttaatttattttatttgaggttgataaagaaattattttttaaatattaatttttgtttagtatagattgtttttagttagggtttttaaatagattgtaaagttttgattgtataattatatattattgtaggatgaaagagaattggtaaataggtttttgttgtggttatagtattagattgaagtaggattaaaattgttttaggattttttttggtagagaaggtagatttattaatgggggaaaaagttataattaatatgatgtagaatttttttaaattgttatgtatatgaattgagaaaaaaattatgttatggatattatgagattagtttttttaatggaataaaataaagtatttgaatagttgttatgttagtatttgtttgtttatattattatttagttaatagaaagatataatttttattttttatttaatatatagatggaagtggtttttatggtaaataaaattagattgtaataagataaaagtaatgatttagggtttggttaatgttaagtttaaatatatatattatgttgagaattttttttgaatatataataaaaaaaaagtgttattgaatgaatattattgtaatgtagtaaagtagaatgtaaattttttgaggttagtatttaagtttgtttttttcgtagcggtgtttatatttttagtatattgtttggtatatagtaaatgtttattaaatatttgtgaggtatatggataggggaatgtggtagatagttgatgaagttgtttttttattgtttttttaggtggattatttaaagttaatcgattttgaattttgaggtttaagttttgttttttttttttattttttttataagtgggcgggataatttttttatgatttaagtataggtggataggggtggttagagagaggaaggggtatttagagatttagtaggtgttgtattatgagtgtttttgttttgagttttagtagacgtttgggtggtgttttcgggattttttaagtgatttttttgtttattttgtttttgttgttgattaaggtagtttagttttatttgtataggtagtggttgtttaaagttttttagtagttttcgtgtttttttttttattggtttttcgggtatatttaggaggtagggaggaatttagtgggggagtgggagggtaaggagggatgcggttttgagattttggttataaaatttatagagtaaagttttgttttgtaataaacgtgaggttttataggaatatttagtttatttttttggttttagtttgttttagttatgaggagtttattttttttatgaagtttattttgttggtttttagttttattatatatgttttttttttgtagatattaagtgtgttttggtagttttgtatatggagggtaatgtttgattgtttttagattgattattttataagttttggttttttttaaagaataaggtttttagatgttttttgtttagttatttaatgttattgtttttgtttggttttgtatttgtttgggagtatagatatttatttgaggattttgtgttatgaggagtttatggtttgtgaagaatataggtaggaatttgagaaggtgttagattgtaggaaaagagtttattttgttggggtggatatttgaggtagagatttgttggtgtaggggattaattggttaagtaagtttttttaaggtttacggaatttttataataggtgatttaggatttgaaaatttgataattgtgggtatatatgaagggggtagtttgtataatgttttttaagtgaggagattggtgtttgagttgtatattgaatagggtgtattgattttttggttttttttttacgtatttagattgtgagttttttggaggtgagtatgttattttttttttgtgtttcggtaattagtaaaattttggtatagtttgatggttagtttaggtgaatagagtaagtttgtttaatttatgttttatggggttgtatgtagtttaggatggttttgaatgtggttcgatataaattcgtaaatttttttaaaatattatgagattattttgtaatttttttgagtttattagttattattagtgttcgtgtattttatgtacggtttaagataattattttttttttaatgtggtttaggaaagttaaaagattggatatattaggtgtagaggaatagaggaagaagagaaaggagtagtaagagggttgaggagggatatagtttattttttgtgtattgttatttttgtatggggagaggggcgggtaggaatagagtaaggtaaacggttgtatggagagggatttattaaggtgttatgaattgaatatatttaagtagagataggggttgtagggagttgaggtttattgttttttagtaaaggaggtaatatagtttttagtagagtagaattaatgtggggatttgataaagttttagttttatatggattggttttaatattattttatttttttttttattttttttttttattatatgttatttattattttattatttgtttttgtattttaatttttaggtttttgattataatgtgtttgttatttggaattatttttttatttatatttatcggttaaggtttagtattaagttattttttttaagaaggttttttgggttttttagaagtgaagggtcgatttttttttttatgggttatttttaagaggttagagtagtgttaatttgatttagttattgttttgtagtgttataagtgtgggatttttttgggagagattatttttgatttatgtttgtaatttaatagttttttagtaaatgatgatttagtgagtgaggaagagttttttaatgtttagttttgagttaggtttttttttaaagtttttttagatgtttgttttttattttattttatgtttattattttttattgtatagtttttaattttttttattttttaattagattgaaaattttatatagataaggattatagttgtgttttaacgtagtgtttgagttatattgggtatatagtatgtgtgtagtaagtatgggttgaatgaaggagtttattttatagtagggtaagttgttttagagttggataatatgattattagaaggaggtgggtagatattagatatttatgtggtagatagttgttttgagttattagaagtagttgaaataaagaagagttggttatatggaatattattaggatttaatgtttttgagggttttagatgagattaaagtaaagttgagttttgaaagttgaggagaggtggttgttttgtggtagatggaagggtatttaaggtagagaaaagagtaagtgttagggtttagaagagtgagtaggtgtagttggtgtgtgaattagtagtagtggtggtatcggcgttggagttgaaataaacgggtgatggtggaattgttagtagggttggaggtaagaaaagagaagttgaagttagaaagttaagggttttgtgatttatatcgaagagtttagaaagatgattgtaggtagtagggagtttataatttattgataagtgaaaatgagaataagaaatttaaattttaaaattatagtttaatattagtattatatgtatatatttagattttattttataaatttgtatatatttaatatgtagaatattattatgtatataattttatagttaatttttttttgtttagttatatatattttaaatgttattttattttaataaatatttattatatattttgggataatattgaaaatataataagtatgattatataaaattattgtgtaatttaaaatgtttatattaatttattttattttttagatatattaaatgattttataaatttgtttattaagtaatacgagttatgtatattgtttaaggaaattgttgtatttatgatttttagagatgttatataatatgaagataatggttgatttaaatttttgttggtagtattgagtgagggtttatagcgtttggtttaaggttaagttttggggagatataaagaatttggattatagtttaggttattagaaatagatttaaatttttaattcgtgttatatggtttttgtagttgttttgttttttatttttgttgtaaagattagaagtaaatgaaagtgtttatttgtttattttcgttgatagt

SEQ ID NO: 50 - DNA, 8327 bp, Artificial Sequence
  chemically treated genomic DNA (Homo sapiens)
attgttaacgagggtagatagatgaatatttttatttatttttagtttttgtagtaggagtgaagggtaggataattataggagttatgtagtacgggttagggatttagatttgtttttgatgatttgagttgtgatttagattttttgtatttttttaggatttgattttaggttaagcgttatgagtttttatttaatgttgttagtagaaatttaagttagttattgtttttatgttgtgtaatatttttggaagttataaatataataatttttttgggtaatgtgtataattcgtattatttgatgagtagatttgtaaaattatttggtatatttagagaataaaatgaattaatgtgaatattttaaattatataataattttatataattatatttgttatatttttaatattgttttagaatatatggtaaatatttgttgagataaaatagtatttgggatgtgtatggttaagtaaaaaaagattaattataaaattgtgtgtataatagtattttatatgttgaatatgtatagatttatgggatggagtttgagtatatgtatatggtgttggtgttggattataattttgagatttgggttttttatttttatttttatttattaatgaattatgagttttttgttgtttgtagttatttttttaaatttttcgatgtggattataaagtttttggttttttggttttaatttttttttttttgtttttagttttgttggtaattttattattattcgtttgttttagttttaacgtcgatgttattattgttgttgatttatatattagttatatttgtttatttttttgggttttggtatttgtttttttttttattttgaatgtttttttatttgttatagagtagttatttttttttagtttttaagatttagttttgttttaattttatttggaatttttaaagatattgggttttagtgatgttttatgtagttaatttttttttattttaattgtttttagtaatttaaagtaattgtttattatataagtatttaatgtttgtttatttttttttgataattatattgtttagttttgaggtagtttgttttattgtggggtaggtttttttatttagtttatgtttattgtatatatattatgtgtttagtgtggtttaggtattgcgttaggatatagttgtggtttttatttgtgtggaatttttagtttagttggggggtaaggaagattagaggttgtgtagtaggggataatggatatgagatggaatgaaggataagtatttggggaagttttgaagagggatttaatttagaattgaatattagaaagtttttttttatttattgagttattatttattgagggattattaggttataaatataaattagagatggttttttttagaagaattttatatttatgatattgtagaatagtaattaagttaagttaatattgttttggttttttgaggatagtttatagaaaaaagagtcggttttttatttttgggagatttaggaggtttttttgaagaaggtagtttggtgttgggttttgatcgatagatatgagtgagaaaataattttaggtagtaagtatattgtgattagaggtttagaggttgaaatgtagaggtaggtagtgaggtagtgagtaatatatggtaaaagaggagaatgggaaagaaggtggagtggtattgggattagtttatatagggttagaattttgttaggtttttatattggttttgttttgttgagaattatgttgttttttttgttgagaaataataggttttagttttttgtaatttttatttttatttaagtgtgtttaatttatagtattttggtgagtttttttttatgtagtcgtttattttgttttgtttttattcgtttttttttttatgtagggatagtagtgtataggggatgggttgtgtttttttttagtttttttgttgttttttttttttttttttttgtttttttatatttggtgtgtttaattttttggtttttttaggttatattggaagaaaaataattattttgggtcgtgtataaaatatacgaatattaatgatagttgatgagtttaaaaaaattgtaaaataattttataatgttttaagaaagtttacgaatttgtgtcgggttatatttaaagttattttgagttatatgtagttttatggggtatgggttggataagtttgttttatttatttgagttgattattaagttgtgttaggattttgttgattgtcggggtataggaaggggatgatatgtttatttttagggagtttatagtttgggtgcgtgggaggagagttaggaggttaatatattttgtttaatgtgtaatttaaatattagtttttttatttggaggatattgtgtaggttgttttttttatgtgtatttataattgttaggtttttaggttttaaattatttgttgtggaaatttcgtgagttttggggaaatttatttagttagttggttttttatattagtagatttttgttttagatatttattttagtagagtgagttttttttttgtagtttgatatttttttaaatttttgtttgtattttttatagattatgaattttttatggtatagagtttttagatgggtgtttgtgtttttaggtaaatgtagggttaggtagagataatggtattgagtgattggatagggagtatttagaagttttgttttttgagaaaagttaaggtttatggggtaattagtttggagataattaggtattgttttttatgtgtaggattgttaagatatatttgatatttgtagaaggagggtatgtgtgatagagttgaggattagtaggatgggttttatgggaggagtgagttttttatgattgggataagttgaaattagagaggtaggttgggtgtttttatgaggttttacgtttgttataaaataaggttttgttttatggattttgtgattagggttttagagtcgtatttttttttgtttttttatttttttattgagtttttttttattttttggatgtgttcgaagagttagtgggagggagggtacgggaattgttggagggttttgagtagttattgtttatgtaggtagagttgagttgttttgattagtagtagaagtagaatgagtagggaggttatttggaggatttcggagatattatttaggcgtttgttggggtttaggatagagatatttatggtgtagtatttgttggatttttgagtgtttttttttttttttgattatttttgtttatttgtgtttaagttatgggaggattgtttcgtttatttgtggggagagtgaagggggagggtagaatttggattttagagtttagaatcgattgattttggatgatttatttaggggaatagtgggagaatagttttattagttgtttattatatttttttgtttatgtattttataaatatttaatgagtatttattgtgtgttaggtagtatgttaggggtgtgggtatcgttgcgaggaaaatagatttgaatgttgattttaaggaatttgtattttgttttattatattgtaataatgtttatttagtagtattttttttttgttatgtgtttaaagaaaatttttaatatgatatgtatatttaaatttaatattaattaagttttgaattattatttttgttttattgtaatttaattttatttattataaaaattatttttatttatatattgagtgaggagtgggaattatgtttttttattaattggatgatgatatggataaatagatgttaatatggtagttgtttaagtattttattttattttattggggagattggttttataatatttatagtatgattttttttttaatttatatatatgataatttaaaaaaattttatattatgttagttatgatttttttttttattgataggtttattttttttattagagaaagttttagagtaattttagttttattttagtttagtattatagttatagtaggagtttgtttattaatttttttttattttataatagtatgtaattatataattagaattttgtagtttgtttaggagttttgattaaggataatttgtattaaatagaaattaatatttaaaaaatgatttttttgttaattttaagtaaagtaggttaaatagtaattattgttatgaattaattttttttggtatttttatatgtatatttgtgtatgagtattgtttttgtttttttttttataattttaatttttattttagatttaggtacgtatgtaggttttttatattggtatattgtgtgatgttgaaggtttggatataaatgattttgttatttaggtagtgagtatggtatatattagttaaatttttaatggttatttatatttgtatttatttttttagtagtttttagtgtttattatttttatatttatgtttataagtatttaatatgtagtttttatttataagtgagaatatgtggtatttggttttttgttgttgtgttaatttgtttaggattattgttttttaatttatttatttgttgtaaagaatatgattttattattttttttttatagttgtttagtattttattgtgtatatgtattatattttttttatttagtttattattgatgggtattaaggttgatgttatgtttttgttattgcgaatagtgttgtgatgaatgtatgagtagaggtgtttttttggtagagtaatttatttttttttggatagatagttaatattgggattgttgggttaaatagtatttttattttaagttttttgagaaatttttaaattgttttttatagtggcggaattaatttatatttttataaataatgtatatatatgatttttttttttttgtagtttagttagtatacgttgttttgaaattttttaataatagttattttgatttgtgtgagatgtggtttttatttatatttttgttgattagtgatgtcgagtattttttttaatatttgttggttgtttatatgttttttttagagaagtgtttgtgtttttaatggggttgtttgttttttgtttgtattggaagttttggataggtaagagaaagaaataaagggtatttaaataggaaaatagaagttaaattgtttttgtttgtagatgatatgattgtatatttagaaaattttatcgttttagtttaaaatttttttaagttgataagtaattttagtaaagttttatgatataaaattaatatgtaaaaattataagtatttttatatattaataagagataaatagaagttaaattatgagtgaatttttatttataattgttataaagaaaataaaatatttaggaatattatttataagggatgcgaaggatttttataaggagaattataaaatattgtttaataaaataaaagaggatataaataaatggaaaaaaattttatgtttatggataggaagaattaatatagtaaaaatggttatattgtttaaaataatttatagatttagtgttatttttattaaggtattattgattttttttatagaattagaaaaatttttttaaattttatatggaataaaaaagagttcgtattgttaagataattttaagttaaaagaataaagttggaggtattatgttacgtgattttaaattatattataagtttatagtaattaaaatagtatggtattggtattaaaatagatatatagattaaagaaatagaatagaggtttcggaaataatattatatatttataattatttgatttttgataaatttgataaaaataagtaatggggaaaggattttttatttaatatatggtgttgggaaaattggttagttatatgtagaaaattgaaattggaattttttttttatattttatataaaaattaatttaagatggattaaaaatttaagatgtaaaattataaaaagtttggaagaaaattttagtaatattatttagaatataagtatgggtaaggattttatgtttaaaatattaaaagtaatggtaataaaagttaaaattgataaatggaatttaattaaattaaagaatttttgtagagtaaaagaaattgttattagagtgagtaggtaatttatagaatgggagaaaatttttgcgatttatttatttgataaagggttaatatcgcgaatttataaagaatcgaaataaaatttataagaaaaaaataattttattaaaaagtgtgtaaaggatatgaaacgatattttttaaaagaagatatttatgtagttaaaaaatagagtaaaaaaagtttattattattggttattagagaaatgtaaattaaaatcgtaatgagatattattttatgttagttaaaatggtaattattaaaaagtttggaaattatagatgttggagaggatgtggagaaataggaatgtttttatgaaggggtggtttgtttttttatatttgtgggtatttttagtcgggtgggataagagattgagaaaagaaataagatatagaggtaaagtatagagaaataatagtgggtttaggagatcggtatttagtatattaaggatttgtataagtattagtttttgagtttttttagtttttattgattattatttttaatattttagtaaaaaggaatgtagtaggagagtagggtgataataaggagaaggttagtaaaaaatatgtgagtaaaataatttatattataattaagtttaagggaaggtattatgtttggatgtgtacgtaggttagatttatgtttttttttatttaaatattttagcggaataaagaataataaggtagtattattgtaaatatgtttcgttttttattatagggcggttttttttttattttagaattgaataaatgtataatcgggttttatattaagatatttagttttcggggtaggtaggagatagtggtttttttttattttaattgtaagaggttttttttttttattaatttattttagtatagattttttacgggtgttgggttgggggatagttaggttttttttattttacgaggttatattttagattgttatatagggagaaattttgggtaatatttagtttttaagggtagaggtttttgtggtttttcgtagtgtattgtgtttttggtttgttgagattagagattggtgatgatttttattaagtatattgtttgtaaatatttttttaataaggtacgttttatatagttttagattttttaaattttaattttatatagtatatgtttttatgagttttaggttgggttaaagtggttggggtaaagtggttggggtaaagttataaattaataatattttagtaaagtaattgtttaaagtataggttttttttaaaatggagttttttatgttttttttttttatatagttatagtaatagtttgattttttttttttttttttatatttttatattgttggagggagtgtaaattaatttaattattgtggaaggtagtgtggtaattttttaaggatttagaattagaaatattatttgatttagtaattttattattgggtatatatttaagggattataaattattttattataaagatatatgtatacgtatgtttattgtggtattgtttataatagaagagatttggagttaatttaaatgtttattaatgatagattggaaaaagaaaatgtggtatatatatattatggaatattatatagttataaaaaaggatgacgttacgttttttgtagggatatggatgaagttggaaattattatttttagtaaattaatataagaatagaaaattaaatattatatgtttttatttataagtgggagtggaataatgagaatatatggatatagggaggggaatattatatatggggatttgtttgggatggtgggttaggggaaggatagtattaggagaaatatttaatgtagatgataggttgatgggtgtagtaaattattatggtatatttatattaatgtaataaatttgtacgttttgtatatgtattttagaatttaaagtataataaaaaaatgaattgtttaatttttttagggattttggatattagatttttgttagatgtatagtttgcgaatatttttttttattttgtaggttgtttgtttatttt

SEQ ID NO: 51 - DNA, 5519 bp, Artificial Sequence
  chemically treated genomic DNA (Homo sapiens)
tttgaagttcgtatggtattgagttttatttaaggtttgtaataagtataatttagttattattgatgattatttagggtttatgttttttttaatttgtaggtggtaaattttgttaggattgggtttttttttttaaggtagtatgttttttttgtttaagagtgtgtttagaaatgttgtttgggagttagagcgtggaatgggagttttaggatgttgtttggtgttttatttttttgtggttgagttggtatttaagttgtttttttttaagtagaaggaagaagttttttttggagtagtaagttgtgttgtttggagttgtgggagggatgatgtttgttaagatttttttggttgttttggttggtgttttattaggttgtgtgtattttaagttttttggttttgagtttagcgtagtattaggatttgttttagaattgtagtttttgtagttggatttattatatattgattgtagagtttttgggtttttaataaatataggtggtagttttttaagtttatttaggattttggagtattttagtttgtaatggtggtattagttggaatttaggttttgattattgggatggataatttttttttgattagggttggtttaaatgttttttttgtcggtattggttaaattttattttatgttgttttttgttgtgatagggtagtattgagttttaatgtaaagttttatgattattgtgtttttttttttttatttaagtatttagattttttttttagttatgaggttatttttgggagatggggaagtgttagtgtaggtaatttaagatttttttggttaggtatagtgggttatttttgtaattttagaattttgggaggtcgaggtaggtagattatttgaggttaagagtttaaggttagtttggttaacgtggtgaaattttgtttttattaaaaatataaaaattagttgggcgtggtggtatgagtttgtagttttagttatttgcgaggttgaggtttgagaattgtttgaattcgggaggtagaggttgtagtgagttatcgtgttattgtattttagtttgggtgatagagtaagattttgttttaaaaaaaaaaaaaaaaagaaaaaaaagaaaaagaaaaaagaaaaaagaaaaaaaatttgttttttgtatattttttagtgtttttttaaatttttaatttttgtgggtatatattaggtatatatgtttatgaggtatatgagatattttgatataggtatgtaatgtatagtaattaaattatggagaatagattatttatttttttaagtatttattttttgtgttataaataatttagttatattttttttattattttaaaatgtacgattaagttattattgattatagttattttgttgtattattaaatagtaggttttattataggtttaattaattttttttatttttatttgtatttattaattatttttaatttttttttatttttttatttttttttttagtttttggtaattatttttttattttttatttttatgagtttaaagtatttttttttttgatatgatgttaaaattagatattatgattatttatttaatttttggtttttatgaaggtatttttttgtgtggatatttgttgtatttggcgtttttgtggaggagacgattaatgacgtattttattttgttattttgttttatttttttttttttgtgatttagatgagattttttgatagttggtggttaaatttttaaatgtaatatttttggtagaaaatatatttatttatgtaaaaaataaaatgtatagtgaaaaatgttttttgtatttatgttttttatttatttagtttcgtcgtttttataaaggtaaatatttttattttttttgtatttttttatagtatatttaggtaaataatatatgtaattaattttttttgtttaggatgatgaattgttttttttttttacgatggttagtttatttttttggggtataattgtaaaatttttatagttttagttgtatttagggttaattttattagttattttatttattatatgatttttatagatgagatacgtaaggtgtagataggttgagagatttgtttaaggttatatagttaggaaatagtagaattgtatttaaatttaggtttggtgaatatttataatatcgtatgttttttgtatggttttaaattttttttttttgtttttgtttgtggatagttttatttattttaaaattatatttacggttaggtatagtggtttatgtttataatttaagtattttgggagttcgaggtaggaggataatttgaggttgggagttggagattagtttgattaaaatggagaaattttgtttttattaaaaatataaaattatttgggtatggtgttgtatgtttataattttagttgtttgggaggttgaggtaggagaatcggaggcggaggttgttgtgagttaagatagggttattgtattttagtttgggtaataagagtgagatttcgttttaaaaaaaaaaaaaaaaaaattaaaattaaaaaaaagtaaaaaattaaaaaaatatttatttagtaggtattttttttttttttttgatgatgagtatcgttttgttttttaggttgaagtgtagtggtatgattttagtttattgtaatttttgttttttgggtttaagtaatttttttgttttagttttttgagtagttgggattgtaggtatatattattatgtttagttaattttttgtaattttagtagaagtagggttttattatgttggttaggttggtttcgaattgttgatttcgtgatttgttcgtttcggttttttaaagtgttgggattgtaggtgtaagttattgtgtttggtttagtaggtattttttaagagtaggtgttatatagtagaaattttatgtagattatatgtagattatgagttatagagtgggtatattatgaagagtaggtggtagtagtaggtattttttatgtagagtaggtagtagtgagtaggtattttttattaggagtagatgatatttagtaaatattttttatatagagtaggtggtatttgtaggtattttttatttagagtaagtggtatttaatgggtttttttttttttttatttttttgtgagatagagttttattttgttgtttaggttggagtgtagtggtatgaatttagtttattgtaaattttgtttttcgggtttatgagatttttttgttttagtttttcgagtagttgggattataggtgttcgttattacgttcggttaatttttgtatttttagtagagatggggttttattatgttggttaggttggttttgaattttcgattttagatgatttgtttgttttggttttttaaagtgtttggattataggtatgagttattgtgtttggttagtaggtattttttatgtattgtaggtggtattgagtaggtattttttatgtagcgtaggtaagagtaggaattttttatgtagagtaagtagtatttagtaggtattttttatgtatagaaggtagtttatagtaggtatattttatggagtataggtaatattcgagtaggtagtatttaatagattttttttatgtagattaggaaatatttagtaggaagttattatatagagtaggtggtattagtaggtattgtttatgtagagtatttggtatttagtaggtatgtgttatgtagatagtaattggtgtttagtgggtattttttatatatagggggtggtatttaataggtatttattatgtagagtaggtggtatatagtaggtattttatgaggaatattaggaattgagtatatagggttaatgtagagtatttggtatatagtaggtatattttatggaaagtatttggtatagagtagataggatttagtatttggtatatagtagttgttttttatttagagtattggtatatagtagaagtattttttatgtagtttttgtgtagagtagagattggtatatagtagtttaagtgttagttgttattttttttttttatttttttttggggttttttttttttaggagtttttattgtttttcgttaaggtttttatcgaatattttattttttagatgggaagattgtatttaggaggggtagtattgattaaagttagagtaaggatgaggtagaatgaggattttatttatggttttttggttttgttttttttttgtttggattttattcgtttttttttattttaattttttacgttttcgttttgtttttttatattgagttcggtttttagatttgtttttttagttgagtttttaatttttagaatttgatttaggtaatttttagtggggttggattttttgttttcgtttttagtagttaggtttttaatagggttttggattgtttggaggtaagatttgaattttatttagtagtagggggatagaggtttgttttttttaggttgtttgatttagtatttagaagtggtatacggtgttttatcggtttagggttagagaggagtataggagatgatttggaataaggtttggtttggtttggttcgtttgatatttgaatttttaagtttatgtttttatttgttatatatttagtaggtgttttttaagagtaggtgttatatagtggaaattttatttgatttttttcggtttattttttattttatgtgggaggtgttgagatttgaggatttagtgtttgtgttgtgttattttgagttggtttttttgtatttagttggttttttatatttaggttttggttagttgtttagatatgggagcggtatttaggttgtggggattggttggtttagtttagtttagtttagttttttatagttttttttatattaggggttaggggaaaaaattttttagaagaaggggagaggaggttgtgtgggataaggtgtttttgatagaaggtgttagggtgggggtggtgggtttggggtattttagtttgtgatggagatgggtattgggtaagggattgggcgtatatataggggagttttagtttttttatattttttattgttgtttaaggtttaggtagtttttggttgttggtttggaggatgagtggttttttaattgaaattaagtttttggtaacgttttaatgatttaggttgggtttttttggattttaattagtttttttgttttttttaatttaagtgtttatcgggtaattggaggttatttggttgttggttttggttgggtttttttggattttattttttagtttttgtttatttatttttgtttatttttattgttttatttttagtattgttcgtttttgtttttttttattgtttttggagttttttgggtttttttttgggttttaggattttatttattattttatttgttttgtagg

SEQ ID NO: 52 - DNA, 5519 bp, Artificial Sequence
  chemically treated genomic DNA (Homo sapiens)
tttgtagggtagatggggtggtgagtgaggttttgaggtttagggaagggtttagggagttttagggatagtggagagaggtagagacgggtagtgttggagatagaatagtaagagtaaatagggatggataaataggggttgaggggtaaagtttagaaaggtttagttaaaattagtaattaagtggtttttagttattcggtaagtatttagattgagaaagatagagaaattgattaaagtttagaaaggtttagtttgaattattaggacgttgttaggggtttggttttagttagaaaattatttattttttaagttagtaattaggagttgtttgggttttgggtagtaatggagaatgtgggaaggttggggtttttttatgtgtgcgtttaattttttgtttagtgtttatttttattataggttaggatgttttaggtttattatttttattttggtattttttgttaggagtattttgttttatataatttttttttttttttttttgggaggtttttttttttggtttttgatgtagggaaggttgtgggaggttaggttgggttgggttgggttagttaatttttatagtttgggtgtcgtttttatgtttgggtagttggttaaaatttgggtgtgggagattagttggatgtagaggaattagtttagggtgatatagtataggtattggatttttaggttttagtattttttatataaggtggagagtaagtcgagaggggttagatagagtttttattgtgtgatatttgtttttaaagagtatttattgagtgtgtggtagataaaagtatgaatttgagagtttaggtgttaagcgagttaggttaggttaagttttgttttagattattttttgtgtttttttttaattttgggtcggtaggatatcgtgtattatttttggatgttgaattaggtaatttggaagagataagtttttatttttttgttgttggatggagtttaagttttgtttttaggtagtttagggttttgttggagatttgattgttaggaacgggaataaagaatttagttttattgaggattatttgggttagattttggagattaagagtttagttggaaaagtaaatttggaggtcggatttagtataggaggatagagcggggacgtggagggttaggatgagagggaacggatggggtttaggtaggggaagggtagagttagggaattatgaatggagtttttattttgttttatttttgttttgattttggttagtattgttttttttgggtgtagtttttttatttgggaaatgggatgttcgatgagggttttagcgggggataatgagggtttttaagaggagggagttttaaaaaggagtgaagggaaagggtggtaattagtatttgagttgttgtgtgttagtttttattttgtataaaggttgtatggaaagtatttttattgtgtgttaatattttaaatgaagggtagttattgtgtgttaggtgttaaattttgtttattttgtgttaagtgttttttataaagtgtgtttattgtgtgttaggtgttttatattaattttgtatatttagtttttgatattttttatagagtgtttattgtgtgttatttgttttatatagtgagtgtttattgagtgttattttttgtatatgaagagtgtttattgagtattagttgttgtttatataatatatgtttattgagtgttaagtgttttatataaatagtgtttattgatattatttgttttatatggtgattttttattgagtgttttttgatttatataaagagggtttattgagtgttgtttgttcgagtgttgtttgtgttttataaagtgtatttattgtgggttgttttttgtatataaagggtgtttattgagtgttgtttgttttatatgaagagtttttatttttgtttgcgttatataaaaagtgtttatttagtattatttgtaatatataaagagtgtttattggttaggtatagtagtttatgtttgtaatttaagtattttgggaggttaaggtaggtagattatttgaggtcgggagtttaagattagtttggttaatatggtgaaattttatttttattaaaaatataaaaattagtcgggcgtggtggcgggtatttatgattttagttattcgggaggttgaggtaggagaattttatgaattcgggaggtagagtttgtagtgagttgagtttatattattgtattttagtttgggtaatagagtgagattttgttttataaaaaaataaaaaagagagagagtttattgaatgttatttgttttagataaagagtgtttatagatgttatttgttttatataaagagtgtttattgagtattatttgtttttgataaagagtgtttatttattgttgtttgttttatataaagagtgtttattgttgttatttgttttttatagtgtgtttattttgtgatttatggtttatatatggtttatatagagtttttattgtgtgatatttgtttttaaagagtgtttattgggttaggtatagtggtttatatttgtaattttagtattttgggaggtcgaggcgggtagattacgaggttagtagttcgagattagtttgattaatatggtgaaattttgtttttattaaaattataaaaaattagttgggtatggtggtgtgtgtttgtaattttagttatttaggaggttgaggtaggagaattgtttgaatttaggaggtagaggttgtagtgagttgagattatgttattgtattttagtttaggagatagagcgatatttattattaaaaaaaaaaaaagagtgtttattgagtaaatgtttttttggttttttgtttttttttggttttggtttttttttttttttttttgagacggagttttatttttgttgtttaggttggagtgtaatggttttattttggtttatagtaattttcgttttcgatttttttgttttagttttttaagtaattgggattataggtatgtagtattatgtttagataattttgtatttttagtagagataaggtttttttattttggttaggttggtttttaatttttaattttaggttatttttttgtttcggatttttaaagtgtttggattataggtatgagttattgtgtttggtcgtaaatgtaattttaagatgagtggggttgtttataggtaaggataaggagaaggagtttgagattatgtaggaggtatgcggtattgtggatgtttattaggtttaggtttggatatagttttgttattttttggttgtgtgattttgggtaaattttttaatttgtttgtattttacgtattttatttgtaggagttatatggtggatgaaatggttggtggagttgattttgaatatagttagagttgtgagggttttatagttgtgttttagggaggtgaattgattatcgtggggggggggggtaatttattattttgaataaaggagattaattatatgtattatttgtttaaatatattatgaaaggatatagaaaaagtaaaagtgtttatttttgtaaagacggcgagattggataaatgaagggtataggtataagaaatattttttattgtgtattttattttttatatgagtgaatatattttttgttaaaaatattgtatttgaaaatttagttattagttgttaaggagttttatttgaattataaaaaggaggaggtagagtaagatggtagaataaaatgcgttattgatcgttttttttataggaacgttaaatataataaatatttatataagaaaatatttttataagaattaaaaattaggtgagtgattatggtatttggttttaatattatattaaaaaaagaggtattttgaatttatggagatagagagtagaaggatggttattagaggttgggaaggggagtggaggagtgaggggaagttagggatggttaatgggtataaataaagatagaaagaattaattagatttataataagatttattatttgatagtataatagggtgattatagttaataataatttaatcgtatattttaaaataatgaaaagaatgtaattggattgtttgtaatataaaggataaatgtttgaggggatggataatttattttttatgatttgattattgtgtattgtatgtttgtattaaaatattttatgtattttataaatatatatatttagtatgtatttataaaaattaaaaatttaaagaggtattaaagaatgtataaaagataggtttttttttttttttttttttttttttttttttttttttttttttttttttttttgagatagaattttgttttgttatttaggttggagtgtaatggtacgatagtttattgtaatttttgtttttcgggtttaagtaatttttaagttttagtttcgtaagtagttgggattataggtttatgttattacgtttagttaatttttgtatttttagtagagatagggttttattacgttggttaggttgattttgaatttttgattttaggtgatttgtttgtttcggttttttaaagttttgggattataggagtaatttattgtgtttggttaaaagagttttaaattgtttatattaatatttttttattttttagaagtggttttatggttggagagagaatttgggtgtttgagtggaggggagagagtatagtgattatgggattttgtattgaaatttagtgttgttttgttatagtagaaagtaatatggggtagaatttagttagtgtcgatagaggaagtatttaggttagttttagttagaagggaattgtttattttagtggttagaatttgagttttagttagtattattattgtaggttaaagtgttttagggttttaaataaatttgaaaggttattatttatgtttgttaaaggtttaagggttttataattagtatgtggtaaatttagttataaggattgtaattttggagtaagttttggtgttgcgttgggtttagagttagagaatttggggtgtatataatttagtgaggtattagttagggtagttaagggagttttggtaagtattattttttttataattttaggtagtatagtttgttgttttaggagagattttttttttttgtttgaggagaggtagtttggatattagtttagttatagaagaatagggtattagatagtattttgaggtttttattttacgttttagtttttagataatatttttaaatatatttttggataaaggaaatatgttgttttgaagggaaggatttagttttggtaggatttattatttgtagattaaagaggatataggttttgaataattattagtggtagttgggttgtatttgttgtaggttttgggtgagatttagtgttatacgggttttagg

SEQ ID NO: 53 - DNA, 7615 bp, Artificial Sequence
  chemically treated genomic DNA (Homo sapiens)
aagttattgttagattttttgggttattgaaaagtatttattagtagtagatggttttattggttttgttgttttaaatgttttagttagtatagtttgaaatttagagaatgaataataggaaaattgatttttttagtataattttgtatagtttaattttgttttttgtttgttttttgagacggagttttattttgtcgtttaggttggagtgtagtggtataattttagtttattgtaatttttattttttgggtttaagtgatttttttgttttagttttttaagtagttgggattacgggtatatattattatgtttggttaatttttttttttgtagttttagtagagacgggttttattattttggttaggttggttttgaattttttttttcgtgatttatatgttttggttttttaaagtgttgggattaaaggtataaattattatgtttaatttattttgttaagagtaggaaaattagtgtagatttatttgtatttagggaaatgtttgtttttttttatttgaatttgtattgttttagtattgaaaaatgtttgtttttggagagtgtgtgtgcgtttggtttagtaagttattagaaaattataagaagaatgaagatgaatattttttttgtatattgttgtagagatttgagggatttagatttgaggtgttaaatgggatcgtttttttgaattattttttacggaaaaaattagatttattatgttttgtataattgtgttttatgaattgttttgttggtgaaaggtagagttggggtttggagtgttgtggggtgggttgtggatgttagagggagattaatttttgtgggtaggtattatagtttttttgtaagggaatgggattttttttttttttaatggggagggattaaagaaagtttatttattgaggagtagtagagaggtaaattttagataggataattgttttgtgtttatgaagggaatttgaaatcgtttttgtaaaattatgattgagataatgaaagagatttaatttaattaattttattttgtttatttttttatttttatttttattgagatagagttttattgtgttgtttaggttggagtgtagtggtgttatttcggtttattgtaatttttgttttttaggtttaagtgatttttttgttttagtttttttagtagttggtattataggcgtttattattacgtttagttaatttttgtatttttagaagagatggggtttttttatgttggttaggttggttttaaatttttgattttaaatgatttatttatttcggttttttaaaatgttgagattataggtgtgagttattatgtttagttagattttattttgtttttaatttttaagttgtttttgtttatttttgggtgtaggttgaacgaattttgggagaaattaatttagtttgtagtttatagtttaaataaagatagtaatagtttttttttaaaataggttttttttttgtttgggaattatattaatattagttataggattaaaaattatgatttaggagttatgtagttggaggttgtaagattttgattttttttaaattgtttttaagattagtgtttgagatattttgtagattttgtatttgatggattagttggtattatcgattaataaattggtttatttgatgttgtggtttttatttaggaattgattgaaggtaggaagatagttttaattttttgtgattttatttttgattaattattatatttggtttattggttattttttaatttttatttattaagttatttttaaaaattttgttttttaaatgtttagggagattgatttgagtaataaaattttagttttttatatagttggttttgcgtgaattattttattgtaatttttttgttttgatgaattggttttgtttaggtagtaggtaaggtgaattttttgggtggttatattaggatttaaaataataaattattaagaattttagagagttatttttttaaatggattatatttattaaaatttatagtattataaattaaaataaatgaaaatgtttattgaaaataattatttatataaataatgttattttatgaatatagttatatttttttttttttttttttcgagacggtgttttgttttgttatttaggttggagtgtagtggtataatttcggtttattgtaatttttattttgcgagtttaagcgatttttttgttttagttttttgagtagttgggattataggtacgcgttattatgtttggttaatttttgtatttttagtagagatggtgttttattatgttggttaggttggttttaaatttttgaatttgtgatttatttattagggttttttaaagtggtgggattataggagtaagttatcgtattcggtttatagttatatttttaaaaataaaatattagtgagaagaatggtatagttttagatttttgtaaattttttttatatttggtttaatagaagattgttgggttttttttttttttttaattttttatttttatagggttttaagaaatgtggtatttggttatatgagtaagttttttagtggtgatttgtgagattttggtgtaattatcgtcgagtagtatatattgaatttaatttgtaattttttattttttatttttttttattttttttttgagtttttatagtttattgtgttatttttatgtttttgtatttttatagtttagtttttatttaggagtgagaatatatgatgttttgttttttatttttgagttattttatttagaataatagtttttaattttatttaggttgttgaaaatgttatttatttatttttttttgtgattacgtagtattttattttatatataaatatataaatatatatttatatatattatagttttttttttttttttttttttttttttgagatagagttttgtttttgttgtttaggttggagtatagtgacgtaatttcggtttattgtaatttttgttttttaggtttaagtgatttttttgttttagtttttcgagtagttgggattaaaggcgtttgttattacgttcggttaatattttgtatttttagtagagacgaggttttattatgttggtgaggttggtttcgaatttttgattttaggtgattttttcgtttcggttttttaaagtgtagggattataggcgtgagttatcgcgattggacggaagaaacggtgaaatttttaaggtggtagaattataggatttgatgattgattagatgaagtatggagagggtaatagtgtgtatagtgatgttttttttttataggtattataggagggataggttggtaggaggaggtaacgggtttagttttggatttattgatcggggatgagtgttagttttttaggtagaggtgtttcgtaggtaattggtgttgcgggataaattatagacgggagagatcgagtagagtttaggagagtttttattattaaggtgattatcggtttagtcggattagggtttagaaagtttgagtttcgaataaagggattaattattttttaagtagtttgtgttgggagttacgtgttgtatgaagtgtatttgtagaagtaagaataaaggtagtaaattatttttatatttgttatattatatgttttacgtttttgggaatatatgtttttgtaatatttgttaattagttttgtgattttatagtagcgttagggagggaagtaagaattcgttgtgttttaaggaatgtgaaacgatggaatatagataagtttttttacgtataggggagaaataagtagttaatatatttttaatttaggttttgggtaggggaggtgttatattatattttattttaaaggaaaagaatatattttttgattagtatatttataaaatttattaattttttttttattggatatttttattaatttttttagggttttgtagttttgttttattcgttgttttattttttagtttagtataaaatttagtttttaatattgattaaataaatgaattcggttaggtgttttcgtgggtgatttggaaggagttaaatttggtagttatgggagacgtttttgtgaagttataggagcgaagattgattgtggcggtaggattgaatttagtttttgaatttttttagtcgttaaatttatagattaagtggcgtttttggggaatgttgttttaaacggttcgcgacgttttaaaatatgtatatttattttggaaaatttgttttcgtaaaatttagtatatttaattattaatatttgttaattttatggtggtatattaatatttgttaggttgattttagttggagtgggacggggttgattttatcgttttatttttcggtatgaggtcggcgtttttacgatttcgttttttataattttagttttcgagggtttatttggggttgtcggagtttttaagacgtggtttcggagaagggtgaggtgttatagttcgaggtgttttagtattttgcgttcggatagggggcggtgtttacgtttaaggtttcgttgacgcgatgtaggtcgagattattttaggcgttcgcggtgtaattatagagcgcgtcgtcgtcgttcgagttcgttttgagattttttcgtttagcgtttttaacgtcgtgtttcggtatttcgtattcgggtatataaaaaacgggtcgttcgcgatttttagggattgatcgtttttttaggtaagttatttttcggtttcgtattattgtgttataggcgtagttcgtttttttaggtgttttatttcgcgtaagaagattacggttttatagagtgttatttaaggggcgtggttagcggaatatttcgttttattttgtgacgtacggggtggcgcgcgtgggattcgaggggtggggttgggtttagtaggagatttggggtaaggttttttgtggacgattatttgttagtttttttcgtttcgtcgattgggaggagcggtggcgatttcggtttttagtgttttcgacggagtgaatggcggcggcggttgggatgttgttgttgggtttgttgtaggcgggtgggtcggtgttgggttaggcgatggagaaggtgataggcggtaattttttgtttatgttgttgatcgtttgcgtttttatttttagtttggtttatttgattcgtttggtcgtcggttatttggtttagttgttcgtaggggtggtacgtatattttttagggtttgagtggggcgcgcgtcgtagttgaggcggtcgaagggttggcgtgggcggtttcgtggtttcgatcggtttagtggatggtaagggcgggggcgattgcggttatgtttggcgtggttttggtggtaggcgcgttgggggttggagtagtggttgcggcggcggtattgttgttggtggcgttggttgtagtattcgttattgttttgtgttggggggcggtgttggttttttcggttgtgtatttgattttagacggggtcgtggttgcggtatttgtggttgtagcggtttgtattgatcgtagtagtggtgtttttagtggcggtggttggattggcggttgtgggtttgaacgattcggtggtcgttggggtttttggtgggggttttgacggagatgttgttggtagttggttcgttattttggaggttgttttgtgtggtttagtgttttgtgggttgtagtagtgtttttaatggtggtttatatttatattaaggaggatgtgtagagtgtggtaatggtagtgattggagtgtggtaagggtttttttttgatgttaataatgtaatagtttttcggtcgggagtagtggtttacgtttgtaattttagtatttcgggaggtcgaagcgggcggattatttgaggttaggagttttagattagtttgaataatatggagaaattttatttttattaaaatataataaaataaaataaaaattagttggatgtggtggtatacgtttgtagttttagttgtttgggaagttgaggttcgagaattatttgaatttaggaggcggaggttgtagtaaatcgagattgcgttattggattttagtttgggcgatagaatgagatttcgttttaaaaaaaaaaaaaattattttttttaatttaatagttttattaatttagtttttaattttttaaatgttatttgattgtgttttttatagttagtaataagtagtttttgaaaattatttttttattgataatgtaatgtataaatttttgattaagtagtttttaaaataatttttgtttgaattatattaggtataagaaagagttatttatttatttattttttttttatatatgggatttttaaggaaatgatatttgtttttgggaagataaagttatttttagtgtttaaagatagttttattagttgaggtgtattgtgaggttgtggtgtttttttttatttgagattattagagaattgaggagtattatttttttttattattttgtttgatttttaggatatttaatgttgtaatttgtaggttttattttgtggtatttaaagaaatttttatgaagaatgttagagtttttgttagagttgatttatttttttaaaaattttaaaattagtggttttagtttatttgtagtgagagaagtatgagattgattgtttattgagaagtaaatatagttttttaaatattttttttttttttatattataagttattgtttgtttttttttatattttttttaagtaagtatttgggattaaaattgtgagtagtagtagtagtaagtagtgaagaaataatatagtgggttttttggggatacgaattttatatttgggaatttagttaagtgtagatttaaaatatttaggggaaaaaaatttaatataaaataatataataataaaaaataatataaataaaaaaatatagtttaataatagtttatatagtttttatattgtattgggtattgtaagtaatatagaaatggtttaaggtatatgagaggatgtgtataggttatacgtaaatattttgttattttatataagggatttgaggatttttggatataaatttgtgagggggttttgggattagttttttataaatgttaagggataagtgtagtttgatttttttggttttttgttattaatggttagaaaagttgtttggagatattaataataattggatatattttggatagtgtttattatttaaatttatagtgttttagtgtttatttggtcgtttattttatatcgtgttttgagtttttgtttttttttataatagttatttttttgaggtatttgtaatttggttgtttttaagttatttttgatgttttttttttttttggtaatttttttttgaagttttaatagttattttgtttaattgtttggttatgaaacgaaattgggttttttttttgaaatgaaatacgaattgaatttattattttttttttttgtaga

SEQ ID NO: 54 - DNA, 7615 bp, Artificial Sequence
  chemically treated genomic DNA (Homo sapiens)
tttataagagaaaaaaatagtaaatttaattcgtgttttattttaagagagaaatttagtttcgttttatgattaaataattaaataaaatagttattaagattttaaaaaaaagttattaaaaaaaaaggaagtattagaagtaatttgagaatagttaaattgtaaatattttaagagagtagttattgtagaaaagaatagaaatttaaaatacggtataagataaacgattagataaatattaaggtattgtaaatttaaatgatggatattgtttagaatatgtttaattattattggtgtttttaggtaatttttttaattattagtagtaaaaaattaaaaaggttaaattatatttgttttttggtatttgtggagaattggttttaggatttttttatagatttgtatttagggatttttaagttttttatataaaatggtaaagtatttgcgtataatttatgtatatttttttatatattttaaattatttttatattatttataatatttaatataatgtaaaggttatataaattgttattaaattgtgtttttttatttgtattattttttattgttgtgttattttgtattgggttttttttttttgggtattttagatttatatttggttgaatttttaaatgtggaattcgtgtttttagagggtttattatattgtttttttattatttattattattattatttataattttagttttagatatttgtttaaagaaggtatagaaaaagataagtagtaatttgtagtatagaaagaagggaaatgtttaagaagttatatttattttttagtaaataattaattttatgttttttttattgtaagtgaattagagttattgattttagagtttttaagagagtagattagttttagtaagaattttagtattttttataaaagtttttttagatgttataaaatgagatttgtagattataatattaagtattttgaaaattaaataaaataatgaaaaagggtaatattttttaattttttggtggttttaaatagaaaggagtattataattttatagtatattttagttaatagaattatttttaaatattaaaagtaattttgtttttttagagataaatattatttttttaaagattttatgtgtaggaaaaaaataaataaataaataatttttttttatgtttggtatggtttaaataaaaattattttaaaagttatttggttaaaagtttgtatattgtattgttagtaaaagggtagtttttaaaagttatttattgttgattgtaaaaggtataattaaataatatttgggagattgaaagttaggttaataaggttgttaaattgaagaaaatgattttttttttttttgagacggagttttattttgtcgtttagattggagtttagtggcgtaatttcggtttattgtaattttcgttttttaggtttaagtgattttcgggttttagttttttaagtagttgggattataggcgtgtgttattatatttagttaatttttgttttgttttgttgtattttagtagagatggggtttttttatgttgtttaggttggtttggaatttttgattttaggtgattcgttcgtttcggtttttcgaagtgttgggattataggcgtgagttattgttttcggtcgagaaattgttatattattagtattagaggaaggtttttattatattttagttattattattattatattttatatattttttttaatatgggtataaattattattaggggtattgttatagtttatagaatattgaattatatagggtagtttttaggatgacgggttagttgttaatagtattttcgttaggatttttattaagggttttaacgattatcgggtcgtttaaatttatagtcgttaatttagttatcgttattaggggtattattgttgcggttagtatagatcgttataattataaatgtcgtaattacgatttcgtttaggattagatatatagtcggggaggttagtatcgttttttaatataaggtaatggcgggtgttatagttagcgttattagtagtagtgtcgtcgtcgtagttattattttagtttttagcgcgtttgttattaaagttacgttaagtatggtcgtagtcgttttcgtttttgttatttattgagtcggtcggggttacggagtcgtttacgttagtttttcggtcgttttagttgcggcgcgcgttttatttagattttaaagaatgtacgtattatttttgcgggtagttggattaggtggtcggcggttagacggattaggtagattaggttgagggtgaaggcgtaggcgattagtagtatggataagaggttgtcgtttgttattttttttatcgtttggtttagtatcgatttattcgtttgtagtaagtttagtagtagtattttagtcgtcgtcgttatttatttcgtcggaaatattgaaggtcgaggtcgttatcgttttttttaatcgacggaacgagagaagttggtagatggtcgtttatagggggttttgttttaggttttttattaaatttagttttatttttcgggttttacgcgcgttatttcgtgcgttatagaatggggcgggatgtttcgttggttacgttttttaaataatattttgtgaagtcgtggtttttttgcgcgggatagggtatttgaggaagcgggttgcgtttgtggtatagtggtacggggtcggaagataatttatttgaagaggcgattaatttttgagaatcgcgggcgattcgttttttgtgtgttcgggtgcggggtgtcgggatacggcgttgaaggcgttgagcggagggattttagggcgagttcgagcggcgacggcgcgttttgtgattgtatcgcgagcgtttgaggtgatttcggtttatatcgcgttagcggggttttgggcgtgagtatcgttttttgttcggacgtagggtattggggtatttcgaattgtggtattttattttttttcggggttacgttttggggatttcgatagttttaaataagttttcggggattggggttgtgaaaagcgaggtcgtgaagacgtcggttttatatcgaagggtaggacggtgaggttagtttcgttttattttaattaaaattaatttgataggtattaatatgttattatgaagttaataaatgttggtgattaagtatgttaggttttacgaaaatagattttttaaaataaatgtatatgttttaggacgtcgcgagtcgtttgaggtagtattttttaaggacgttatttagtttgtaggtttagcggttagaaagatttagaagttgagtttagttttgtcgttataattaattttcgtttttatggttttatagaagcgttttttatgattattaaatttaattttttttagattatttacgggagtatttgatcggatttatttatttaattaatgttaagaattaggttttgtgttaagttaggggatagagtagcgaatgagataaaattgtaaggttttgggggaattagtaggaatatttagtgaaagggaaattaatgaattttataagtatattaattaagaagtatattttttttttttgaggtagaatgtaatatagtattttttttatttaaggtttgggttaagagtatattaattgtttattttttttttatgcgtggagaggtttatttgtgttttatcgttttatattttttgaggtatagcgagtttttgtttttttttttagcgttgttgtaaagttataaaattgattagtaagtgttataaaagtatgtatttttaaggacgtaagatatatggtgtaataaatgtaagagtaatttattgtttttgtttttgtttttgtaagtatattttatgtaatacgtaatttttaatataaattgtttaaaaggtgattgatttttttgttcggggtttagattttttggattttagttcgattgagtcggtgattattttaataataaaggtttttttgaattttgttcggtttttttcgtttatgatttgtttcgtaatattagttgtttgcggaatatttttatttagagagttaatatttattttcggttagtaaatttaaaattaaattcgttgtttttttttattaatttgttttttttataatgtttgtgaagaaaaggtattattgtgtatattgttgttttttttatgttttatttaattagttattagattttataattttattattttaaaagttttatcgtttttttcgtttagtcgcggtggtttacgtttgtaatttttgtattttgggaggtcgaggcgggaggattatttgaggttaagagttcgagattagttttattaatatgatgaaatttcgtttttattaaaaatataaaatattagtcggacgtggtggtagacgtttttaattttagttattcgggaggttgaggtaggagaattatttgaatttgggaggtaaaggttgtagtgagtcgagattgcgttattgtattttagtttgggtaataagagtaaaattttgttttaaaaaaaaaaaaaaaaaaaagaaagaaattgtgatatatataaatatatatttatatatttatatatggaatggaatgttacgtggttataaaaaggaatgaatgaatggtatttttagtaatttggatgggattgaagattattattttaagtgaagtaatttaggaatggaaaataaaatattatatgtttttatttttaagtgagagttaagttatgaggatgtaaaggtataagaatgatataatggattatggggatttagggaaagggtggaagggggtgagggataaaagattataaattgggtttagtgtatattattcggcgatggttgtattaaaattttataaattattattaaagaatttatttatgtaattaaatattatattttttaaaattttatggaaataaaaaattaaaaaagaaaaaagaatttaatagttttttattaagttaggtgtaaaagagatttataaaaatttaaaattatgttattttttttattaatattttatttttgaaaatatagttataggtcgggtgcggtggtttatttttgtaattttattattttgggaggttttggtgggtagattataagtttaggagtttgagattagtttgattaatatggtgaaatattatttttattaaaaatataaaaattagttaggtatggtggcgcgtgtttgtaattttagttatttaggaggttgaggtaggagaatcgtttgaattcgtaaggtggaggttgtagtgagtcgagattgtgttattgtattttagtttgagtgatagagtaagatatcgtttcgaaaaaaaaaaaaaagaaaatatagttatatttatgaaatgatattatttatgtaaataattatttttaataaatatttttatttattttaatttgtaatattgtaagttttgatagatataatttatttaaaaaaatgattttttagggtttttaataatttattattttaagttttaatgtaattatttaaggggtttattttgtttgttgtttagatagagttaatttattaaggtaggggagttgtaataaagtaatttacgtagagttagttgtgtgggagattggagttttattatttaaattagtttttttgagtatttggagagtagagtttttaaggataatttggtgggtgggagttggggggtagttagtgagttaggtgtggtgattggttaggggtgaaattatagggagttgaagttgtttttttgtttttagttagtttttgagtggaggttataatattagataagttagtttattagtcggtggtgttagttgatttattaagtgtagggtttgtaaaatattttaaatattgattttaagagtagtttagggagggttagaattttatagtttttagttgtatgatttttaagttataatttttaattttgtggttaatgttagtatagtttttaggtaagaaggaggtttgttttgagaaagggttgttattgtttttgtttaaattataaattataaattaagttagttttttttaaagttcgtttagtttatatttaggaatgaataaagatagtttggaggttagaagtaagatggagtttggttgggtatggtggtttatatttgtaattttaatattttgggaggtcgaggtgggtggattatttgaggttaggagtttgaaattagtttggttaatatggggaaattttattttttttaaaaatataaaaattagttgggcgtggtggtgggcgtttgtaatattagttattgaggaggttgaggtaggagaattatttgaatttgggaggtagaggttgtagtgagtcgagatagtattattgtattttagtttgggtaatatagtgagattttgttttaataaaaataaaaataaaaaaataagtaagatggagttggttaagttaaattttttttattgttttagttataattttgtaaaggcggttttaggttttttttatagatatagagtagttgttttgtttgaagtttatttttttgttgttttttagtgaatgggttttttttaatttttttttattaaaaaaaaaaaaagttttatttttttgtaggaaaattgtaatgtttatttatagggattggtttttttttggtatttatagtttattttataatattttaaattttaattttattttttattagtagagtaatttataagatataattatgtaaaatataataaatttgatttttttcgtaggaggtggtttaggaaaacggttttatttggtattttaagtttaggttttttaagtttttataatagtatgtaaagaaaatgtttatttttattttttttatagttttttggtaatttattgaattaagcgtatatatattttttaaggataaatattttttagtgttgggataatgtaaatttaggtaagggaagataaatatttttttaagtgtagataaatttatattgatttttttatttttaatagaatgggttgggtatggtggtttatgtttttaattttagtattttgggaggttaaggtatgtggattacgaggagaggagtttaagattagtttggttagaatggtgaaattcgtttttattaaaattataaaaaaaaaaattagttaggtatggtggtatgtgttcgtagttttagttatttgagaagttgaggtaggagaattatttgaatttaagaggtggaggttgtagtgagttgagattgtgttattgtattttagtttgggcgatagagtgagatttcgttttaaaaaataaataagaaatagaattggattgtataggattgtgttgagagaattagtttttttattatttattttttggattttagattatgttagttagagtatttgaaataataggattaatgggattatttattgttggtggatattttttagtgatttaaaagatttggtagtagttt

SEQ ID NO: 55 - DNA, 9293 bp, Artificial Sequence
  chemically treated genomic DNA (Homo sapiens)
tttttatgttttttttttggagttttatagttttaggttttaagtttaagtttttaatttattttgggttgatttttgtatatagtataagatgagtttaattttatttttttgtatgtggaaatttattttttttaatatttttatttaaaagattattttttttatattgtgttttttggtattttttttttttttttgagattgagttttgttttgtgtttgaatttttaggttaagaatatttaatggtagtagttatagttgtttaaagttattaatggtatttgggagaaagattagttgaaatgttagttaatgttgttgtggattgtgtttgtatgttttaaaaacgttttgtgggtcgggcgcggtggtttacgtttgtaattttagtatttagggaggtcgaggtgggcggattacgagtttaggagttgagatttgtttggttaatgtggggaaattttatttttattaaaaaatatattaaaaaattagtcgggtacggtggcgtttgtttgttgttttagttattttggaggttgtggtacgagaattgtttgaattcgagaggcggattgtgttattgtattttagtttgggcgatagagtaagatttcgttttaaaaaataaaaaaataaaaatattttgttatttatttattgtgtgtaaagaaatatatattgtaaaattatttatattttgataattaggtgtatttatttttgttgtattaaatgtattataagttgttaattttttatataatatttgtaatgagtattttgtaatatatagattttaattaattatttttttaaggttgaaataattatgtttagtagaagttttattaataaattgtatatgtttttgttatagtatgatgaatatagtgttatatttttttgatgattttagtttattttataagtatgtagtaaaatagttttttttgttaagttgtatatatttgatggtttttatgtttttttagtatgttattttgtttttagattttagatttgtaggaagtatattgatttttatttttgtatttatgatggtttttgtatttcgttttttaggtattaatgaagattataaggggaaatttataattaagtttattaagttgataaatattattttatagaagtagttgagtttgtgtagataaatttatgggttgtgtaattattatttaatgtttagggttttttattttttttgttttttattattttttgggttgatttagtttttttaataaatttgtatgttgttagttagaacgttgttttattttttagttatattagaatttttataggagaaaatttttaaattgaaggagtagtaaaatttttggtaagaaaggattaggtggtagtacgattatgattggttgggtgcgttgtattttgttttttatttgtagttttaaaatttgaaaagtttagaaaattaaaatttttttgtttgtttttttgagacggggttttatttttatttaggttggagtgtagtggtatgattttggtttaatgtaattttcgtttttcgggtgtaagcgattttttagttttagtttttcgagtagttgggattataggtatatattattacgttcggttagtttttgtatttttagtagagatagggtttcgttatgttggttaggttggtttcgaatttttgaatttaggtaatttgtttatttcggttttttatagtgttgggattataggcgtgagttatcgtgtttggttttaaaggtattttttttgaatttagtgtaaatttattttgattagatgttaatagtttttattttattttatgttaatattttttgttttattgtaaaatattagtgtatttgatttaatatttttgtagggggagtgggggtgtttatttaataattaatatatagtatatgtattgtatcgtttttaaagtttcgattttaaattttattattgagacggggttttgttgttgtgttatttaggttggtatgtagtggcgcgattatagtttattaaagttaaaattttgtaggtttaaattatttttttattttagttttttgagtagttgggattataggtgtgtgttattataattagttaatttttgtattttttttattagtttcgttatgtttttttggttggtttcgaatttttgagtttaagtattttagagtattttttaaagtgttgggattataggtaagagttattgcgtttagttagttttaaagtttagaattttttttttaaaaattttttttaaaagttttaaattttgaaatatttggttgttagggttttagataagagattgtggattaaaaattaagatgttttgaaaagtgtttttttttgttttttttttgtgttatttttaggttatgtaggaaaatgggaaattatgttggatttaatgttaaaaaagttagattttttgttttttttatttattttgttgttgttagttgagataggattttattggagtatagtggtatgattttggtttattgtagttttgattttttggtttcggtaatttttttattttagttttttaaatagttgggattataggcgtttggttaatttttttattttttgtagagataagagttttgttatgttgtttaggttagttttaaatttttgggtttaagcgatttatttgtttcggttttttatatttgtattttttaaagtatatttttaagtttagatgaatttaagtttttgtagttagaaattggtagaattggtgtttgaaattttttattttttagtgtttaaattttttattattgtaagatattttttgtgtgggttttttttgtggaaattatatttggagatttttattttttaattttaagtttttttatgatatttatttaggattagttttgtttttttgttgaaggttttaagagatttgttttttttttttcggtagttgttagtatttttattattttatgagtttttttttaagtttggttgtgaaatgtgatatttattagttttcgtagtattttttttttaatttttttgttatatttgatgataattttttaggttttttatatttttaggattttgttattaattattatagggataagtaaaagtaatatatataaaataattgtataatagaataatatagggtagttatatagaatgatttttgttgtttaattttggaaaatgtgattttcgaggatttatattttaatttttgttttttatttttgaggatggagttatcgttttttttttttggttatatatttagatgtattttaggtttgatgatagttgtaatgtaaaaaagaatagtaaggtttttggtttttgtagataatttggattagataatttttagattgggtaatattcggtttattagtgttattggatgggaagttttgattgagttgtttgggtttttggcgtgttgaataaagaattgaataaaacgtagaaataaagtaataaaagaagtaacgaaagataaaataataaaagaacgaagtaataaaagtataaatttattgaagcgaattaagtgttttaagagttttaattgtagtgtttttaagggttattaggttaaaagaatttggtaaatttttaggtgttttttatagtcgtttaattggttgtattttatgaaggattggtttgcgattaattagaggttgaaatggagatggtcgaggataattagaggcgatgtggaaatttttgttttgtaattataggagtgaaggtgtggtttgtatgttgtttagttttgtttagaaattgttgtatttgttgtttttttgtttatgttttaatttttggttattttaattttttatttttttgttttattaggtttttattttgattaaaaatgtatttatttagttgggataaattttatattgtatttgttttatttagatgagtattttagtagagtatatggtatatgagtaggtatttaaaaatttaatatatagtatattttgttatttatgtgttaggtgtcgggtaggttgagttaatagttgaatagaaatttatttatttaacgtgttaatttttatatagtatggtcgtgtatttaaattaaatggaaagcggtatgggagatttggaaaggttttttgtgggtggtatttgattatttaaatttttattttagttttatttattgattttgatatttggaataagtagttttttagtgtttgtttttttattggtaggtaaatgggttaatgacggtatttttggtattagatttcgttaattaatgaaaagtatatagaagaaaatagtttggttttttaagtgggtagtgcgatttttaaggacggtatttcgtttgatagtttttttttaggttgagaagttagagtaaatttatttgatttttttattatatagtgttttttttttagatgagtttaaagttttaagtttatttagttttgtttagacgcgtttgtttatttttaataggtttattagagaggcgggttttttaaagtttggtacggtttattgtaggtgacgttttttgttttttagcgtttttaggtttttggggtttattttttttttttattcgatttcggaattttttttcgcgttttgttcgggcgtttggttgtttggggtagaggtttttcgttatacgcgcggtttcgtttcggtttttacgtgatttggcgtgcggagcgcgtacgcgggaattcgcgttggaggcgggcgagggtcgaggggtagttagggagcgcggtttgaggagggcggggtcgtttcgtaggttcgttagtgtttttagttgttttcgcgcgttaaagttaaatttcgatattcgtcggcgggtcggtgagtttattagttgattcggtaggttaggatttggtttagcggcgtcgcgagttttagtgcgcgtattcgtggtcgttttttagttttttttgtcggacgagttttgggtcgttataagattaaggaatggttatttcgtttaagagaagttgttcgttttttttagttagttttgaggggattcgtattaagaaaatttttatcgaagggaatatcggtaaggagttttcggaaatgtgggacgtaaggttggggtgtcgcggtagtggttgaagttttttttcgtcgtatttttttgtagtaattcggtgagggttttttttttagtttggcggtgtggacgcggtttcggtttttttttttatttagagtattttttttttatttttcgttttacggggtgattgcggttttcggggttagattgggcgttaggtttgcggtttttgtgaggcgcgttttgaatttttgttttttttttgttgggaattcgtaaagggaagcgggggaagggtattagattttttgaggtgtaatttatattaaatttattttttttaggtgtatttttttatgaggtttgataaatattatgttttttgttattattatgatcgagatatagaatatttttattattttagaaagtttttatttgtttttttgtatttagttttttttattttttttattttttggtatttattgatttgatttttatttttgtaagtgttgttttttttagaatgttatataaatggaattataggttatatcgttttttgtgtttggcgttttttatttagtataatgtttttgaaatttatttatgttatttgtgtttgtagtttgtttttttttattgttgagtagtattttattgtatggatgtattatcgtttatttattttttagttgtggattttagggttgtttatagttttttagttatattattagcgaagtattgttttagttatattattaacgaaattcgaaatattcgagtataagtaaagaggtttttaatgattttaatagtatggagttttttattttttattttatatttaagtaaatattggattatgatttaaagattattaacgtttttgttaatttagatggggggtagattaggttatgtttgttattttgtaagatatatattaacgttcgatttttttgtatttttaattataggaaatttatttttgaaattttttgttttgatagatttaaaaaaaaatttttttagttttaggttgggtgttggttatttatgtatatagtaaattttttaaaatttttattatatttaaagtattgtatttttttgaaaaaggttaggtaagtagatgttttaagtatttaaatgaatagaaaaattgtatttttaaagaggattttttattttattgttttagaattaaagtattagtagaaagattatatgatataattagtaatgtaagttatttgagggtgtatgtttattagtatggaatttttgatagttgtttattgaataaagaagattatatataaagataggagaaagtggttgaataaagttatttgaaaagtaaatttgaggtagggtatggaggtttatatttgtaattttaggatttggggaggtttaggtaagaggattatttgagtttaggagttttagattagtttgggtaatatagtgagaatttatttttataaaaaaattaaaaaattagttgtatgtgttggtgtgtttttagttatttaggaggttgaggtaggaggattgtttgagtttaaagattaaggttatagtgagttatgattatattattgtattttagtttgggtgatagagtaagattttgttaaaaatatagaaataaaatagtaaagttgaatgaataatttttcggattaatattataatatatttattttttttttttttttttaatttagttaggtagtattatatttagaaatatttttttaaagtatttttaatttttttagtagttgaaataattttttaatatattattttatttttagttttttttaattatttttgtaacggtttttttgtatgtaaatgttatgtgttattttttgtttaaaattttttattgattttgtttttatttatattgaaagtagttgtgaattgatagtttgtaattgtataatattggtttgtataggttgaaaaaaaattttattggttagtggtttaagtttgtaattttagtgttttgggaggttgaggtaggaggattgtttgaggttaggagtttgagattagtatggtaatatagtgagaattagtttttaagaaaaataaaaataaaattaggttaggtatagtggattacgtttgtagttttaattatttaggcggttgatgttgatgtgggaggattatttgaatgtgggaggtagaagttgtagtgagttgagatggtattattgtattttagtttgggtgatagagttttaaaaaaaaaaaaaaagttagttgtgttagtatgtacgtttagttttagttatttaggaggttgaggtggagatttttgagatttatagtttgaggttgtcgtgagttgtggttgtgttattgttttatagtttgggttatagagtgagattttgtgtttaaagaaaaaaaaattaaatttgttgttaattcgaaaacgttttgagattttttataaataattagatttttggttttttttgaaaaatttgaagatttgttaatatcgggtttgtatttttgtatgataataattggtgtttagatggagtatgttttttgttatttttcgtttttttgatattgagattttgttagttattgtttattattggttttgtatttttgtttatgttttttttattttatttgttagatttaaataagttgtaaatgtataaattgttaagttgtgcgtaaattattttgtaatttttttattttttttagaatttgaattttatttggtcgttttagttttatatttatataatttatttttttatgttttgtgttatttaaatgtttttttatgttagattgatggaggatttatttgttttttattttaatagtttgtttagaatgatttttagtattataatgtttgtttggtattaggaattttgttagtttttatgattttttaaagtattaatattagtgtttttggtttttgtttttttttgtttttatagaaaattaatttattaattagtttattttttagtttttattttgttttaataagttaaggaattagatgtgttagtgtgattgggaattttagttgttattattttgtttgaattaaatgtaattgttattatttttagattttttaagtatgattatatgaatttttttgtttgtaagtagtgttagaagaaagttgaatgttgtagttttaagtgtttttagattttggtggatgtttaatttttttatttgttttttgggtgttatttttgaatattatgttttttttttttttttttatttagtttagtgaatgtggggtgttttttttatatgtttttatttttatttaatatttttttaaatgttgtatagtttttaagtttatattttttatattaaattttggtggttagtgtttttattatgattaaattttattgttatttagtttatcgttaaaagtttttttttttttttttggatatagtttattttgtgttttttttttaaattgtttatttgtgttattttttttattgtttcgtttttgttttttttttgtgtgtaattttttaaagtttttttaggtttttttttttttttattgttttgtttaatgttttagatttaaatatagttttgtaagttaaaggtaagttttttttattttttatggatttaatttataaggaagaggaagttttgtttgtaagtatattgaagttatttatatgtttatttgtgtgtgtgtgtacgtatatatagggaaagagagagaatattatgttaattagagatgtttaatataattatatttggtgattttagatataaagggtgtggtggttattaggagtattatttttaggttaagattgtttttattattaaatataatatattgttaaattaaacgtaataaaaaataaatgtgtttaatgaaattgggtagggagtttttttatttttttttaaagaaatatgaagagaaagtttagaaagttgaatgttttgggttttttatgttgtttgttattgtaaattttgtaaaagttaatgattatttgatattttttttttttgataattttttttttttaattttatttttttttataatagt

SEQ ID NO: 56 - DNA, 9293 bp, Artificial Sequence
  chemically treated genomic DNA (Homo sapiens)
gttgttgtgaggaaagataaaattgaggaagaaaagttgttaggaaaaaaagatgttaagtagttattagtttttgtaagatttataatagtaagtaatataaaaagtttaaaatatttaattttttaaattttttttttatatttttttagaagaaaatgaaaaggttttttgtttaattttattaagtatatttgttttttattacgtttagtttaataatatattatatttaatagtagggatagttttgatttagaagtaatatttttaatggttattatattttttatatttgaagttattaaatgtggttgtattagatatttttggttagtataatgttttttttttttttttgtgtgtgcgtgtatatatatatagatgaatatataaataattttaatatatttataagtaaagtttttttttttttataaattagatttatggggagtagaaagaatttatttttgatttgtagaattatatttaaatttaggatattagatagggtaatagaaaagaagaaaaatttggaagaattttaaagaattatatatagagaaaaaataggagcgaggtagtaaagaaggtgatataggtagatagtttagaagaaaaatataaagtaaattgtatttagaggagaggagaaaaatttttaacgataaattggataatagtgagatttaattatggtaaaaatattggttattaaaatttagtatggagagtgtaagtttagggattgtatagtatttagaagaatgttaagtggaagtgaaagtatatagaaagaatattttatatttattgagttagatggaagagggaaaggagaatatgatgtttagaaatagtatttaaggaataaataaaaaaattaggtatttattagagtttgaaagtatttaaggttatagtatttaatttttttttgatattgtttataagtagaaaaatttatatggttatatttaaaaagtttaagagtaataatagttatatttagtttaagtagagtaataatagttagagtttttaattatattaatatatttagttttttaatttattggggtaaagtgggagttagaaaataagttaattaataaattaattttttatgaaggtaaaggagaataagaattaaagatattgatgttaatattttaaaaagttatggaaattaatagaatttttaatgttaagtaggtattataatgttgaaagttattttgaatagattattaagatgagaagtaggtaagttttttattaatttaatataagggaatatttgagtaatatagaatataagaagatgggttatataaatataaaattaaaacgattaagtaaagtttaaattttaggaaaaatagaggaattgtaaaatagtttacgtatagtttaataatttgtgtatttatagtttatttggatttggtaaataaggtgaaggagatatgaataaaagtgtaagattaataatgaatagtaattaataaagttttagtgttagggagacgaaaaatggtaaggaatatgttttatttaaatattaattgttgttatatagaaatgtaggttcggtgttaatagatttttagattttttaaaagaagttaagaatttaattgtttatgggaaattttaaaacgttttcgagttagtaataaatttaatttttttttttttagatatagggttttattttgtagtttaggttgtagggtagtggtataattatagtttacggtagttttaaattataggttttaaagatttttattttagttttttgagtagttaggattaaacgtgtatgttaatataattggttttttttttttttttgagattttgttatttaggttggggtgtagtggtgttattttagtttattgtaatttttgttttttatatttaagtgatttttttatattagtattagtcgtttgagtagttggagttataggcgtgatttattgtgtttggtttaattttatttttattttttttagagattagtttttattatgttgttatgttagttttaaatttttggttttaagtaatttttttgttttagttttttaaagtattgggattataagtttgagttattggttagtaaaatttttttttaatttgtgtaggttaatattgtgtaattgtaggttattagtttataattatttttagtgtaggtaaaggtaaaattagtgaagaattttaagtaggggataatatatgatatttgtatataaaaagatcgttgtagaagtagttaagagaaattggagatgggatgatatattaggaaattattttagttgttgaaaagattaaagatgttttgaggaaatatttttaaatatgatgttatttaattggattggagagagggaaaggggatgaatgtattgtggtattgattcgaggggttatttatttaattttattgttttgtttttgtgtttttaatagagttttgttttgttatttaggttagagtgtagtagtgtgattatggtttattgtggttttgatttttgggtttaagtaatttttttgttttagttttttgagtagttggaggtatattaatatatgtaattaattttttaatttttttgtggagatgagtttttattatgttgtttaggttgatttggaatttttggatttaagtgatttttttgtttaagtttttttaaattttgggattataagtatgagtttttatgttttgttttaaatttattttttagatggttttgtttagttatttttttttgtttttatatatggttttttttatttagtaagtagttgttagagattttatattagtaaatatgtatttttaaataatttatattgttaattatattatatggtttttttattggtgttttaattttggagtaatgaaataagaagttttttttgagaatgtagtttttttatttatttgaatgtttaaagtatttgtttgtttggttttttttaagaaggtatagtgttttgaatgtggtaagaattttaaaaaatttgttgtatgtatgaatgattagtatttaatttggagttaaaaaaatttttttttaaatttattaaaataggaagttttaggggtaggttttttgtggttggagatatagaagaatcggacgttggtgtgtattttgtaaagtgataggtatggtttagtttgttttttatttgagttaatagaaacgttagtggtttttgaattataatttaatgtttatttggatgtggagtaaggggtgaggaattttatgttattaagattattaaagatttttttgtttgtattcgaatgtttcgagtttcgttaataatatagttaaaataatgtttcgttaataatatagttaaaaaattgtaaataattttgaggtttataattagaaaatggataaacgatggtatatttatgtaatggaatattatttagtaataaaaagaaataaattatagatataagtaatatgaatgaattttaaaagtattatgttaaatgaaagacgttagatataaaaggcgatatagtttatgattttatttatatggtattttggaaaaggtaatatttgtagggatagaaattaaattagtgggtgttagggaataggaagggtggagggggttgaatataaaggagtaggtaggaattttttaaggtgatgaaaatgttttgtatttcgattatggtgatagtaaaaggtataatgtttgttaaattttatagaagagtatatttaaaaagggtgaatttaatgtaagttatattttaagaaatttaatatttttttttcgtttttttttgcgagtttttaataaagagggagtagaggtttaaagcgcgttttatagagatcgtaggtttggcgtttagtttgatttcggggatcgtagttatttcgtggagcgggaggtaagggaaggatgttttgggtgggaaaggaagtcgaggtcgcgtttatatcgttaggttggagggaaagtttttatcgagttgttgtagagagatgcggcgaagggaagttttagttattgtcgcgatattttagttttgcgttttatattttcggaggttttttatcgatgtttttttcgatggagatttttttgatgcgggtttttttagagttggttgagaaagacgggtagttttttttgggcggggtggttattttttagttttgtggcggtttagagttcgttcggtaaagagggttgggaggcggttacgggtgcgcgtattggagttcgcggcgtcgttaagttagattttgatttgtcgggttagttagtgagtttatcggttcgtcggcgggtgtcggggtttgattttggcgcgcggaggtagttgaggatattggcgggtttgcggggcggtttcgttttttttaagtcgcgttttttagttgtttttcggttttcgttcgtttttagcgcgggttttcgcgtgcgcgtttcgtacgttaggttacgtgaaggtcggggcggggtcgcgcgtgtggcggaaggtttttattttaagtagttaggcgttcgggtagggcgcgggaagaggtttcggagtcgggtggggaggaagggtggattttagaggtttgagggcgttggagggtagagggcgttatttgtagtgggtcgtgttaggttttggaaaattcgtttttttagtgggtttgttggagatgaatagacgcgtttggatagaattggatagatttaaagttttgaatttatttggggagaaggtattgtgtggtaggaaaattaaatggatttattttggttttttagtttagaggaagattattaggcgaagtgtcgtttttgggaatcgtattgtttatttagagagttaggttgtttttttttatgtgttttttattaattaacgaagtttagtgttagaaatatcgttattagtttatttatttgttagtgggaaaataggtattgagaggttgtttgttttaagtgttaaagttagtaagtgaaattgggatgggaatttaggtagttagatgttatttataggaggtttttttagattttttatatcgttttttatttgatttggatgtacgattatgttgtatagaagttagtacgttgggtaggtaggtttttgtttagttgttaatttagtttgttcgatatttggtatataggtaataaaatgtattgtatgttgaatttttgaatgtttatttatgtgttatgtattttgttagaatatttatttagatgggataaatgtagtgtaggatttgttttagttagatgagtgtatttttagttagggtaaagatttaatgaggtaagagaatagggaattagggtaattaagggttaaggtataagtaaaagaatagtaggtgtagtaatttttaggtaagattaggtagtatataggttatatttttatttttgtgattataagatagaagtttttatatcgtttttgattgttttcggttatttttattttagtttttgattggtcgtaggttaattttttatagggtgtaattaattggacgattgtaaagggtatttagggatttattaaatttttttagtttagtaatttttaagaatattgtaattgggatttttgaagtatttggttcgttttaataaatttgtgtttttgttatttcgtttttttgttgttttgtttttcgttgttttttttgttgttttgtttttacgttttgtttaattttttgtttaatacgttaaaaatttagataatttagttaagattttttatttagtaatattaataaatcggatattatttagtttggaagttatttggtttaaattgtttatagaaattaaaggttttgttatttttttttatattgtaattattattagatttgaaatgtatttaaatgtgtagttagaaggggaaaacggtgattttatttttagaaataaagagtagaaattaaaatgtgaattttcggggattatattttttaggattaaatagtaagaattattttatgtaattgttttatattattttgttatgtaattattttgtatatattatttttatttatttttatagtgattaatagtaagattttaggaatataagaggtttgaagagttgttattaggtatagtaaggaagttgggagaaaggtgttgcggaagttaataggtattatattttatagttaagtttgggggaaaatttatgaaatggtaagagtattggtagttatcgagaggaggaaggtaagttttttgagatttttaataggaaagtagagttggttttggatggatgttataaagaggtttggggttaaggagtagaaatttttaagtgtggtttttataaaaaagatttatataagaagtattttataatgatgaagagtttaagtattggaaaatgaaagattttaaatattagttttattagtttttggttgtaaaaatttgaatttatttgagtttaagagtatattttgaaaaatataaatgtgggaggtcgaggtaggtgaatcgtttgagtttaggagtttgagattagtttgggtaatatggtaaaatttttgtttttataaaaaatagaaaaattagttaggcgtttgtagttttaattatttgggaggttgaggtgggagaattatcgaagttagggagttaaggttgtagtgagttaagattatgttattgtattttagtgagattttgttttaattaataataataaagtaaatgggggaagtaaagaatttagtttttttggtattaagtttagtataattttttatttttttatatgatttgggggtaatataaggagagaatagagaaaagtattttttaaaatattttgatttttggtttataattttttatttaaaattttggtagttagatgttttagaatttaaaatttttagaaaagatttttagaaaagaaattttaaattttggaattggttggacgtagtggtttttgtttataattttagtattttgggaggtattttggaatgtttgagtttaggaattcgagattaattagggaaatatggcgaaattaatagaaaaaatataaaaattagttggttgtggtggtatatatttgtggttttagttatttaggaggttgaggtgggaggatggtttgggtttgtaaagttttagttttagtaagttatgatcgcgttattgtatgttagtttgagtgatatagtagtaagatttcgttttaataataaaatttggaatcgaaattttagaaacgatatagtgtatatattgtatattaattattaagtaagtatttttattttttttgtagaggtgttaaattaaatgtattaatattttgtagtgaaataaagagtgttaatatgaagtgggataaagattattaatatttggttagaataagtttgtattgaatttaaaaaaaatatttttggggttaagtacggtggtttacgtttgtaattttaatattgtgggaggtcgagatggatagattatttgagtttaggagttcgagattaatttggttaatatggcgaaattttgtttttattaaagatataaaaattagtcgggcgtggtggtgtgtgtttgtggttttagttattcgggaggttgaagttggagaatcgtttgtattcgggaggcggaagttgtattaagttaagattatgttattgtattttagtttggatgagagtgagatttcgttttaaaaaaataaataaaaaaattttggttttttgagttttttaggttttgaaattgtagataagagataggatatagcgtatttagttagttatgatcgtgttgttatttaatttttttttattagaaattttattatttttttaatttgggaatttttttttgtgggaattttagtgtaattaaagaatgagatagcgttttgattgataatatataggtttattaggaaaattaaattaatttagaaaataataaaaagtagaaaaaataagagattttgaatattaagtagtggttatatagtttatgagtttgtttatataaatttaattatttttgtaaaatgatatttattaatttaataagtttggttataaatttttttttgtaatttttattagtgtttagaaaacggggtatagaagttattataaatgtaagagtgggagttagtgtgttttttgtaaatttgaaatttgaaagtaaaataatatattagaagagtataggagttattagatgtatatagtttagtaaagaaagttgttttattatatgtttgtgaagtggattgaggttattaagaaaatgtgatattgtatttattatgttgtaataggagtatgtataatttattagtaaaatttttattaaatatggttgttttaattttagaggaataattaattagaatttgtgtgttgtaaaatgtttattgtagatgttatataagggattaataatttataatatatttagtataatagaggtaaatgtatttaattattaaaatgtaggtaattttataatatatatttttttatatataataaatgaataatagagtgtttttatttttttattttttgagacggagttttgttttgtcgtttaggttggagtgtagtggtatagttcgtttttcggatttaagtaattttcgtgttatagtttttagagtaattgggataataggtaagcgttatcgtgttcggttaattttttaatgtattttttagtagagatggggtttttttatattggttaggtaggttttaatttttgagttcgtgattcgtttatttcggtttttttaagtgttgggattataggcgtgagttatcgcgttcggtttatagggcgtttttaaagtatgtagatatagtttataatagtattggttagtattttaattagttttttttttaaatattattagtgattttgagtaattgtggttattattattaaatatttttaatttgaagatttaaatatagaataagatttagttttaaaaaaaaaaaaaaggtgttaagaaatataatgtgaaaagagtagttttttaaataaaggtgttgggaaaaatggatttttatatgtaggagaatgaaattggatttattttatattatatataaaaattaatttaaaatggattaaagatttaaatttaaggtttgaaattataaaattttaagaagaaaatataggga

SEQ ID NO: 57 - DNA, 17848 bp, Artificial Sequence
  chemically treated genomic DNA (Homo sapiens)
  unsure (2183, 8830, 9169, 9333, 9339, 11774)
taatttaaattagtttttgataagcgagattttattagagagagagagagagaaataatgttttaggtattgagggtttaagaaggtagttattatttattatgtgttatataatgtttattgggtggtaattgtgtggtaggtgtggtaggtggatttttttttttaatttttatttttaggttattggaatttagagtttatattgttaattattttttgatacgtttttttttatgattaggtgtattaatatagtttatttaggggagtagagttattatgggtattatgggaataagggttttattataggaatgatattttttttaaagattgaaggagttggaaaagtgaaagtttgtaaggaattgtgggatattttaagaggagttataaatgggtggaggattaggtgaaatttatttgttgggtatttttgtttgttatagtatttgattagaagatttttatagaggaatggttgatatttttattttgttttttaaattttattttaggtttttttttggttaattttaatttagagttttgttggtagggcgttttggaagtgtattttttaatttaattaaatcgatttagtataatttagtatattataaaatttttaaagtaggtgagatatagttggttaaaagtttaggttgtagaataaagtttgggttatatttttgtatgtttattttttttttttaatggttgtatgatattttaaataatattggttagtattttatgtatacggtagtatttagaaatattggaaaaatagtaaattttttagagttgtattttaaggattaagtagagtgtttggtatgtagtagatgtttagtaaatattggatgaatgaatggatgttgaatgattagagtttttgtaggataatattttgtttaagataaaatcgtttaggggtaggaagtggtttcgtttttttaggtaagggggaggtaattttatttattaatatgttattatttttagttttttggttagtatttaaatgggatgaaaatttcgtgtttattgtttcgaagaggaaatgattattatttttttggggtgttttttttttttatgaagatttttttaattgtatttttttatgtgtaaaagtggggttttaatttttttttttggttatagttgattgaattatgattagatatttgaatatagttgggttaattagatttttttttttgggaatttggaattgggatttaaataaataaaaaatatttaataaaataagtatagataattaaaggggggtagaaagattattattaatgaattaagataattgataggtaatttaggtaaaagatattttagttttttatattatattttatattaaaaaaattttgaatgtttttagaggttgggtgttgtggtttatatttgtaattttagtattttgggaggtagaggtgggtggataatttgaggttaggagtttaagagtagttaggttaatatagtaaaatttcgtttttattaaaaatataaaaaattagtcgggtatggtatatgtttgtaattttagttatttgggaggttgaagtatgagaatcgtttgaatttaggagatggaggttgtagtgagttaagattgttttattgtattttagtttgggtaagagattttgttttaatataagaaaagaaaagaaaagaaaagaaaagaaaagaaaagaaaagaaaagaaaagaaaagaaaagaagtaaattatagagataaaatatttataaaggatttatttagaatatttgaagaataagataagtaaaagataattaatagaaaaatggatataagattttaatagaggatattgaaatgattaataaatatataaaaagatgtttgattttattaattagtaggaaaatgtaaattaaaattataataagttataattatatatagtaaaatggataaaatttaaaaagttgataatattaattgttggtaagaatgtgggaaaattagaatttttttttattgatgatggtaatgttaattagaataaatattgtggaattatttattatttgggaatatttattaaagttgagtatatatatgtaatttattatatagtagttttagttttatttatatatttaagagaaatgtatatttttttntattaaaagatatgtataagaatatttatcgtaatattatttattatggtttaaatttagaaattttcgagtatattgtggtatagtgatatttgtggatattatatagtaatgagaatgagtgaattataattaatatatttaatttggatgaattttatagatatgttaaataaaagaagtatttattatataattttatttatataaagaaaacgtaaaattaatttttattgttgaagttaggttaatggttatttttgagggatagtaattggtaacgaatatgggggattttggagatgcggataatgttgttttttgatttgaatttaggtaatagttattttatttgtgaaaattttattgaattgtatatttataatatatttttttttttttattgtataatatatttttttttttttattatatattatgttttattataattttttttttttttttttttttgagacggagtttcgttttgtcgtttaggttggagtatagtggcgcgatttcggtttattgtaagtttcgttttttcggtttaggttatttttttgttttagttttttgagtagttgggattataggagtttattattatatttcgtttttttttttttttttttgtttagtagagatagggttttattatgttagttaggatggttttgattttttgatttcgtgattcgttttcgttagttttttaaagtgttgggattataggcgtgagttatcgcgttaggttattttattataaaatttttaaaaataatttttaggagttttgttattggtggagggtgtttaggtttttgatattttgaataaagaattggataaaacgtataaagtaaggaaataatgaagtaataaaagtatagatttattgtatattaaagaatatttttttcggtaggaagggtttaagtaagtagtaattatagaattttttggggtttaaatattttttagaggttttttattggttatttggtgtatattttatgtaaatgaagtagtggttagcgattagtttgattggttgtaggaggggattaattagaggttgaagtaaagttatgaagttatattttatgtaattaaagatttggtttgttattagtttgattgattgttcgcggggattagttagaggtatttttaattttttatttgttatttagaagagggattagtttttggtttttttgttatttgggttagaaagttggggttttttttttgatttagttttaggaagttagtttaaatcggttttaggttttttgtttttagattttatttttttgtttcgtagtttttaggagattaatgtttgtttgtagataatttttttatttaatttttataatatttttgaggtagtaagattttggcgaggtagagagttttttaagtttttttggatgaatattttttaagtttgagtttatataggtaaagaaatgtaagtagtttttttttgttttttttttttgttttgttttgttttgttttaatagaagtggttgttggagtggagatgggaatgggtaggattttagtcgttttagtagttattaacgttttattttggttatttttaaaaaattcgattaaaaaaaaagtttttaatatataaatatgattttagttattttatatatatattaatataagaaaaaggtttcgtgttttttatgggaatagttttaagataggtattttagttttcggtttttttttagtttttttgtaattagatttttgttttttaaaatttgttatatttaagagcgttgtttgaaggtcggtttggtttgttgatttttggttttgattgttggtgatttaagcgattggaattggaagtattatttgataatattttgtaaattattatttttgaggttgttatgacgacggggtgtggtagttcggttttatttgtggtagtagtttaggtttttgtttttttgtagagtatattttatcgatagtaggatttaggttttatataagtttttattcgttattgtttacgtttaagaatttaatttattaggtttaaataatttttagttatatatttgagttattattattttattttgaagggatttttgggtataatgtaaatcgattgatcgaatatttatttatttatttaagatataaattaagagatggggtgtaattgattatttaatttgttaatttagttaataatatgttagtattgtgtaggggaattatagggaataggaaaaagttaaatttgtgtaaattattagattgagttatttttttattttaaaatttttattttttttcgatattaaaataaaaattagataataagtatttgggggggggaaatttttttttaaaattataatttttatttttaattttgtttttagttataaaatttattttaaagttatataaaaatgaagtggttggattgtggaattacgttttttaaaatgttatttgtttaatgaataaaaattattcgtatcgtaattttttttattattaaattttgtatcgttgtaaaattttttttatttaacgtttttttataaatatcgcgatagcggagcggttttttgggcgtatttcgtcgtatgtttaattttatttattttttgtttgacgatttttttacgttaacggtgcgttggagcgagtgagtagcgatatttagggcggaagtgttttcggcggaagtgatcgttgtgtgaatcgtgggtgggatggtcgcgggtcgtttttttttaagtcggtttcgagtattttttagttttatggttaagagtttattcgagggcgtttttttttttagaggtttgtacgcggggcgcgggtttcgaaggttttttatcgaaggtaatattggtaagggtcggaaagcggttgttaagttttggttttcgttacgtaggcgatagaggttgggaaaggagttgggttcggaatggtttgcgtttgatgcggtcggtttttttttttgggttgcgaggagagttttttttttcgtaaagtgtattgtgtatttttgtttttttgtttttaggatatcgggttttagtattcgtttataggaatatatttgttggggtataaaagttacgtagttagtggataggataagaattgtattagttgtttgtaatagatcgaaattgaagcgataagcgggtgtagtttatttgtttttttagatagggttgttatatttagtagaaattaaaaataatatttagttaaaatagaatttaagataacgaataatttttagtgtgtgtttaatgtaatatttgggatatttttatagtaaaataataacgaaattatttattgaaagtttaaatttaattgtgttttgtattttatttggtaattttattcgaagagagtttttaaattttagtcgtttaaatattatatttataatttttgttttgtgtttgtgttagttgtataataattttttaaggttttttttagaagaattttattttttaaatttaaaaatatgtattaaattaaaaattattttgttaaaagagtgagatttagtattttgaataaaaagtagttagaaagtaaaatgaaggtaaagtatttcgatttaatattaataaattttgatttgatatttttatttattaagttattgagtttttaaaaggggtttagtaagtgttgagtattgaagacgtagtagtaaattgagaatttttttttttatttatttaataaattattttttgagttatttttatatgttagtattgtttttggtttggagaatatagttgtgaatagaataaataaaaatttttgtttttatggaatttaagtagggagagatggataataaataatataaattaagtaaggtgaataatatgttagagagtaataagtatgatggagaaaaattagggatgaagaattgagggaagtttttattttattttatttgagatggagttttgtttttgttatttaggttggagtgtaatgatacgatttcgatttattgtaatttttgtttttttggtttaagcgatttttttgttttagtttttcgaatagttgggattaggggtattcgttattatatttagttaatttttgttttgttagtagagatagggttttattatgttggttaggttggttttaaatttttaattttaggtgattcgtttgtttcggttttttaaagtgttgggattataggcgttagttattgtatttggtcgaagttgttattttaaataaaataagtaaggttttattgagaaggtgatatttgagtaaaaaattgaagatgagggagtaaattacgtggatatttgggagaagaattttttaggtagagtgaagagtaattggaaaggttttgaggtggaaagtgtgttcggggaataggagggaaatcgttgtgattgaagtcgagtgagtaaggatgggagggaaattagggtaaaagtttaaggggtggttagattttataggttttattatgggtttttaattttatcgagatgggtagttattggaaggtttgaggagttaagtgatagttttatttagattataaaaagattattgtggttgataatattgaaagtgaagagtgttaagtggtattgtaataattatagtattgtgaaaagtgaaagtggtgagacgtgattggattttagttatacgttaataaaaattgagttatattttaagtaaaatttaatagtggaagtggtgagaaatgattgggttttagttatattttaagatagggttaattggatttggtgataggttgaatgtagagtgtaaggtaaagagaggggttaatgatgattttaattattttgatttgagtatttgaaagatagatttttgatttttttttatttttttttttttttttttttttttttttttcgtttttttttttttggtgtggttttgttttgttgttaggttagaatatagtgatgtaattgtattttattgtagtttgttttttaggtttaagttatttttttattttagttttttgagtagttggatttataggtgtttgttattatgcgtggttaattttgtatattttttgtagagatagggttttattatattttttaggttggttttgattttttgggtttaattgatttttttgttttggttttttaaagtgttgggattatagaagtgagttttggttttaagtatgttaggtttttatatgtttattaatatttaagtagaggtgttgaataggtaattggatatgtaagtttagaattagggttttttcggattggagttgtaaatgtaggtggtatttaatgttagagattatgtgttgatggaaaggattgagttttgagtatgtaaatattatgaaattggggagatgggaaggaataagtagagattgttaaggaatgtttattgaggtaggagaaaaaaataaaagagaatgatattttggaagttaagtgaagaaggtatttagtgggagggaatgattagttgtgttatattgtttaagtaaatgaaggtttttggtgaatttgaaaagaatagttttaggagtgttaggagtgaaagtttaattggtataggtttaaggagaatgggaggtgaggagagtgggttaagataattggaagtttttagaaagggaagttatggggtggtagttgaaattagaagagggtgtgagtgtttaatatttttaattttttttttgtgaaaagaattagagtatgtttttaagttgatagaagtggtttagtggaaaggaggaaaattggtaaatcgggatagaggatagaattgttggagtgatttttaagtaagaaagaatggaatttattgtttagtgggaaataatttagttttagttaggagtataatttatttttagtaataggcgtgatggtaaaatatatgagtattaattttagagggtgtggtgggaatttgggaaggttttttggttgtgtttgtttttagagtgaagtaggaagaaaggttattagttaagagtgaatgtagagatagaagatatgaaatattttagtgaataagtaagagaaatgttgaattattgggtattatttaggatttatttggagttagtggttatgaatttaaagtgagattagttattatggttgtgtgtttttttttagttaaattcgaaatattgaaaggaatgggaagggagagttttgttatttgtttgatgatgttattatttaaatatgatgttttgtattgtattttgagaaatatatttttaaaggaagttttgtttttaaattttagagagagaatagggtatgttataaagtaagtatttaggataggttattagataaggtttgaattttttttatttttttgatttttgttttttaattttgttaaatttttttgttttttttttgtttttttgtgtaatagaggtttattgagtgaggattaagagtttatttttatgttgagtatagtagtgaatgggatatagtttttgttttttaaggagtttataatttataattaagtaggagaaaatagattcgatataattntttttttttttttttttttttttttttggagatagagttttgttttggtatttaggttatagtgtagtggtgtgattttggtttattgtagttttcgttttttaggtttacgttatttttttgttttaggtttttaagtagttgggattataggcgttcgttattatgtttagttaattttttgtattttttagtagagacggggttttattatgttagttaggatggttttaattttttgatttcgtgattcgttagtttcggttttttaaagtgttgggattataggcgttagttattgtgtttggtcgattcgatataatttttatattgtgtggngagatttgtgattgggtatggaaagttagaatttttggggtaggaatttttaagaggaagaagagggaaaaagtgttttagttatagaaagtaatatgtgttaaggtggtgaagtttgaagaatatatgtagtttttggggggtttttttgtttgtttgtttgnttggtngaaagaagtttttttttgtatttaggttggaggtaggggggggatttaattttttgtattgtattttgagaaaatatttttaaaggaagttttgtttttaaattttagagagagaatagggtatgttataaagtaagtatttaggataggttattagataaggtttgaattttttttatttttttgatttttgttttttaattttgttaaatttttttgttttttttttgtttttttgtgtaatagaggtttattgagtgaggattaagagtttatttttatgttgagtatagtagtgaatgggatatagtttttgttttttaaggagtttataatttataattaagtaggagaaaatagattcgatataattttttttttttttttttttttttttttttttttttgagatagagttttgttttggtatttaggttgtagtgtagtggtgtgattttggtttattgtagttttcgttttttaggtttacgttatttttttgttttaggtttttaagtagttgggattataggcgttcgttattatgtttagttaattttttgtattttttagtagagacggggttttattatgttagttaggatggttttaattttttgatttcgtgattcgttagtttcggttttttaaagtgttgggattataggcgttagttatcgtgtttggtcgattcgatataatttttatattgtgtggtgagatttgtgattgggtatggaaagttagaatttttggggtaggaatttttaagaggaagaagagggaaaagtgttttagttatagaaagtaatatgtgttaaggtggtgaagtttgaagaaatatatgtagttttttgggggtttttttgtttgtttgtttgtttttttgatggagttttattttgttatttaggttggagtgtagtggtgtgattttattttattgtaattttcgttttttaggtttaagtgatttttttgttttagttttttaagtagttgagattataggtatgtgttattacgtttagttaatatatgtagttttaatgaaagagaagtagttggatgtgtttggagttgaagggatttgtgaaagggtggtagaataagaggttggaagggtgggatttgttatatgtcgaagagttttgtggattatgttagtttattttgttggtagtgggaggttgttgaatatttgaagttagtgtgtgttatgattagattaatttaaaaaaggaaattgtgtaggatgagaaagaaagttttataaaataggtattttttttgtatattttgtttgttgtagtatttatagtgttttgtatttagtttgttggatgaatgaatagatgaattggaatagagttgagtttgtgtattagttttgtggttattggagtaattggagggaggaaagatgtaggtttgaatagaagaattgaaatgatagagaagtgacggttttagagagattttggaagcgggattgataggatgtggtggttatttggaggtgaggtaggaggaggagtagaggagggtgatattgaggtttatgaggatgggaataaaggaagaggcggtttggggaggttagagtgatatgttttgtatgaggtgtttgtgagatatagaggtgttttgagatagattggaatatgtgtttgaggttaagagagttcggagatgggtgttgagattttagatgtggaagttgttgattggtgggtagaggggtagttggtgaagttttggaagtaaatgtaattgtttaagaaaagggtgatgcgaagtggaatgggaggatttaatttgattttttttatttttattttttattattttttattattttatatattttgatgattttttttagatagaattagttattgttttttttgtgggttgatataatattttgtatttataattgttgtagtatttgagttttgttgagtttgtttgtatatttattattttttttgggttttgattatttagtgtgttgtttatttttgtattgttgatatttaattttcgttttgatttagtgtatttagtattgattagatttttgaattttgtgttatgatatttatgtggaagttaggtattggtatttatatagggaatgtattaaattgttttttaaattaagagtgattattttttttaattataggtaatatttttaagtaaattagaatgagagtatttatttaggaaatttgaatagggaaggtgaatttttgttttgattaaaattgggtatgtttagagggttttttttgtattttttttgttttaagttttattattttgattttgaaggtgtagatagcggtatgtaaggaaaattgattagtgaagtagtaattaatggtatttagtatgatttacgaagttatataagatgtgtgattganagttaaaagtttggtatttagaatttttgaaaatttaaaaaataaaatatttagtttgttttttaagattgtttatttttatagtgtattattatttttttgtgattattttacgattataagcgtaaattgaagaaaagattgttgtatgaaattttattgttagtgagttattttagtatttttattttatttttaaagatttaattagaaaagaggaaatttttttgtattttttaattaagaaatttaaatataaagtagtagagggtttttttaataatatgttttttttagtatttaaaattagtgattttatattattaatatgtgttttatttattttgagtataaatgattgggtaaagaatttttgggaaaaaatagtttatttattttaaatattgtatagtggattttttgtgtttgtgatttatttttttttttttattattgtttttatatttaggatgtaaaggtttagtttttgtttttaaaagtgagtttttagtttagttggagggagtgatgagtgaataaataattatagcgtaattttttggtaaattagagtaggtagtaattaattttgtttagagatgaagtggcgttggagagagtttaaggaggttttatagagaaggtggtagtggaaagttgaattatttggtaggtaaggcgggaggaggggatgttagattagtgagggttttttgtgttgagtagatgagtttggattataggaaggtgtgagaaaattttttgttttttttttttcgtaaatagttttttatgaaaaaaggttattaaagtaaaatgtattaagttttttttaagtttgttgattgatttttattaattttgtttagaatgtttttaagtttggagtttgtatgattttgggtatttagttttggggttagaatataatttgagggtaagtttttagtttagattattattttagttatagtatttatttttgagtagttattttataaatatttgttgattgaatgagtgagtgaatgaatgtagtattaaatatagtatttgaaataaagattttaattttttttggaaggattttttaaaaaagatattagatagttttatatgttttgattttgttggattttggtaaaagattttagaattggatttttttttttatgttttttattttgtttaggagatgaaaatgtttagaggtgataaatataggtttttatgaaatatagttgtattagacgtaaaataatgggatttgttattttgggtattatattatatgttattttgttgttagattttagtattatatagttatggtaggtattgttagtttatagaaaattttgtggggagaaaaaaatatgttttaggaaaagatgagtggtaataatagaattttttgttttagtttgtggaatgagaatagtggagttaatgaaaattaatatgttgaagtaatatatttttaagaaagtattttttatttttttttaaggttgtggtaatataataatagagaatattggtggttagggttttaagggaaggtttgatgttgtttgtaagttttgatattttttaaaatttataatattgagagtatattgaaagataggtcgggcgatgtggttaatttttgttattttagtattttgggaggttgaggcgggtagattatttgaggttaggagtttaagattagtttggttaatatggcgaaattttgtttttattaaaaatataaaaattagttaggtgtggtggtacgtgtttatagttttagttattcgggaggttgagaggttggagaattagttgaattcgggagttggaagttgtagtgagtcgagattattttattgtattttagtttgggtaatagagtaagattttgttttaaaaaaaaaaaaaaaaggaaagaaagataatagtagtggttcggcgtagtggtttacgtttgtaattttaatattttgggagattaaggtaggtggatcgtttgaatttaggagtttgagattaatttgggtaatatggtgaaattttgtatttgttaaaaatataaaaattagtcgggcgtggtggtatatatttgtagtggttttagttatttaagaggttgaggtaggagaatcgtttgaatttaggaaatagaggttgtagtgagtcgagattgtgttattgtattttagtttgggtaatagttagattttgttttaaaaataaataaataaataaataaataatatattggataggttaaatatattggatagttatttaggaggttgaggtgagaagattatttgagtttaggaggtagaggttgttgtgagttaagattatattattgtattttagtttgggtgatagagagagatttttattttaaaaggaaagatagtagttaagttgggatttaattaaattgtagtaagtttgagatagtgatattataagagattggttgaagaagtatggttttttgtagataggggtgttttggttattaggaggaggtttttgaagtaatggagagtaaaatattattatttttaggaattttttgtgaatattttgaaatatttgttaaaataaataaataaataatattttagtaagaagggaaaaaaaaaatttatgatgattaggtattatagtattgagaaagttatattgtgtttggttttaataaaattatgtaattttgaattattttttaaagtaattattttatatttgtgggtggtatttggtatagtttagttttagtggaattagtttaagaaatattgttttgtagtgaattatttaggttttttaaggttgagaaatatggatggtatagtttttaggatattttattattatttattgttattgtatgttgaagttgttttgtgattattaaattagttttttagaagttttggaatggggtatgggttatagagtattttgagtattaggtgttattgttttagttattggaattgtatattttttgttatatttaatttgttggtattttagaattaatgtgtttaaattgtatgagttaattttttggagttttgattgtttttagatgaattaatagtgtttgattttagagttttttttttttatttgtaatagttttttaaggtaattgtttttaatttttaaaaaatataagtaattttaataattgtttaattttagttatttaataaattagttacgtttatttttttatttaattaaaatagttttttagttattaaatagtagggattatattttagatttgttaaataatttataatttaaatattgattatttgggttaaatattttaagcgagggtttatttagggtagataggtatttgataatatatatatttaattatttcgtatttgattagtgtggtaggaatttagagttagagaagttttgaagaagtggtattttaggtttgttgggggaaaggatttagatataggtttggaagagtaggggagggtatttatttattggagtgtgggaagagtagggatcgaatagatgtgaagaagtatatataagttaggtggaggtggggattgagagatgagcgtgattgtataaatttatagatttatgttgtttgtttttattttgtttatttagagaggagttggggtggtatgtagtaaatgttatttattaaatgtgtgggtttttatgttgagatattagtattttaattagtaattataagtggaaggatgtttttttttttttttttgagaaagattatttttgatagaggagattgaggtttagatatagttttaagatttattttttattttttataaatgtaggttttagagggaattgaaattagtaatatattgtgtattttatttatttagttaggttattaggttgtaatttgttttttattttggaggagttttattttttagttggagaaatataatgataattgtagtgatggagttttatttagaatattaattatgtagaaaggaggattagttaatttagtttagaggtgttaggatttggaaaggttttatataggaggtttatttaaatagaattttgaggattgagtaagagttggttaggtgaggagaggaggcgttttaggaaatgggaaagtatatgtaaagttatatttgtaagagaatatggtatgattggagtttggttttgtaggagggtaggttatttaaaggaaagttaaggttagagaggtatatatagggattagatttttttgtgttttgtagattatgttaaagagtttggagtttgttatgaagtttgtttaggttttagtttagatgttattaattttttattgtatttagaatagaatttagattttttattatggttataaggttttatgtgatttggtttcggattgtttatgtggttatatttattttgagttatttttttattgtttgtttttgttatagttagttagtcgatagagagttgttaaaagattgtaagtagtgttattttatatttagtttggttatagtatggagtatggattgaagagagtaaggttagtattagaaaggtaagagatgataagaggttggttttgagtatggaggtgggaatggagagaaaaggataaatatgaaaaatgtagaagtaaatgtagaaggatttggtggttattgaggtttggtagaggagggatttttgttagtgagtggatggtgtgtttatattttgaggtttgggatataggaggaagtttaatttggtgggaaagatgattagtttatttaggaaatatgttgattttgaggtgtttgtggaatgttttaagtggagatgtttggagagtttttgaatagtttttggagtttatggaggtatgggttaaatattggtataaatgggaaaagataatttgaatgttgtggtattaggttgattttatttttaaaatatttttcgaaataattattattttttatttttttgttattatttcggggtaagttgttatattttttaattagtttgtttgtttttgttttagtttatttttatatagttagtggagtgattttttaaaaatgagaaggagttttataatttttttatttaaaattaatttttattaattttttattgtttttagaatagaatttagtttttttattataattataaagttttgtatgatttggttttggattttttgtttggttatatttatgttgagttatttttttattatttgtttatgttgtagttatattgtatggttttttttagggttttaaatttttgtattgttgtgtgttaagtttttttttttttttaggtttttgtatatgttattttttttgtatgaattgttattttttaggttttattttagatgttatttttttaagggagttttttttgattttttgggttatattagtgttattttgtatttttttttagtatttaatataatatgttagtagttaattgtgcgtttgtattatttatataagttttgtgacgataaaatttattttgtgttttgtttattattgtatttatagtttttgatagttttgagtttatagttagtattttatgaatattttttagatttgttgaatgaatgagattataattatttttattttttgttttgaaaaatttagaaattttatattgttatagtataaatagaatggtgatttaagtgatagaatttatggagttgattttatttatttttatatttttaattgttattaaatgttttgtttttggaaggttgagatatggaaattgtaaattaaattttaaaaggaattttttttttttattggttgtatttattatggtagttttggttagtatgaattgatttgttattagtttgataatggtacggttgttgagtttgaaatttagaaaattaatatttgtttttttgagtttgggcgtttgtggtagagtttagtagtagtttttttttttagttttgatttgggaagtattttaatatatgttatttgtattgtagt

SEQ ID NO: 58 - DNA, 17848 bp, Artificial Sequence
  chemically treated genomic DNA (Homo sapiens)
  unsure (6075, 8510, 8516, 8680, 9019, 15666)
gttgtaatgtaaatagtatgtattgggatgttttttaaattagggttgaaggagaaggttgttattaaattttgttataaacgtttaaatttaagggaataagtattagttttttgaattttaaatttagtagtcgtattattgttagattgataatagattaatttatgttaattagaattattataatgaatatagttaatagggaggaaaaattttttttaagatttaatttgtaatttttatgttttaattttttagaggtagagtatttaataatagttgaaaatgtaaaagtagatgaaattagttttataagttttattatttgagttattattttatttgtattgtgatagtgtaaaatttttaagttttttaagataaaaaataaaaatgattataattttatttatttaataaatttaaaaaatatttatggagtgttgattatgagtttaggattgttaggaattgtgggtataatggtaaataaaatatagaatggattttgtcgttatagagtttgtatgggtgatataaacgtataattaattattaatatattgtgttaggtgttaggaaaaaatgtaggatggtattaatatagtttaggaggttagaggagatttttttgaaaaaatgatatttgaggtaagatttaaaagatgataatttatgtaaagggagtagtatatgtaaagatttgaaagagagaaagaatttgatatataataatatagaagtttgaggttttagaagaagttatatagtatggttatagtatgagtaagtgatggagaagtggtttaatatgggtgtggttagatagggagtttagggttaggttatatagggttttgtagttatggtaagaagattgaattttattttaagggtaatgggaagttagtgaagattggttttaagtaggaaaattataagatttttttttatttttagaagattattttattagttgtgtaagaatgggttgaagtagaagtaggtagattagttaaaagatatagtagtttgtttcgaggtgatggtagaggagtgaaaagtagtggttgtttcgagaaatattttggagatgaaattaatttagtattataatatttaagttatttttttttatttatattaatgtttggtttatatttttatgagttttagagattatttaagaattttttagatatttttatttgggatattttataaatattttaaagttaatatattttttaaatgaattaattattttttttattaaattgagtttttttttgtattttagattttagggtatgaatatattatttatttattgatagaagttttttttttgttaaattttagtggttattaaatttttttgtatttgtttttatattttttatatttgtttttttttttttatttttatttttatgtttaagattagttttttattattttttgtttttttgatgttggttttgttttttttaatttatgttttatattgtggttagattgaatatgaaataatattgtttataattttttgatagttttttatcggttaattggttatagtaagggtaagtaatggaggagtggtttaagatgggtgtggttatatgggtagttcggggttagattatatagggttttgtggttatggtaagaggtttgaattttattttaagtgtaatgggaagttagtgatatttgagttaagatttgaataagttttatgataaattttaaattttttaatatggtttgtaagatataagaagatttgatttttgtgtatgtttttttggttttggtttttttttaggtagtttatttttttgtaggattaaattttaattatgttatgtttttttgtaaatatgattttgtatatgtttttttattttttgaagcgttttttttttttatttgattaatttttatttaatttttaaggttttgtttagatgaattttttgtgtgaagtttttttagattttgatatttttaagttggattagttagtttttttttttgtatggttggtattttgggtgagattttattattgtaattgttattgtgtttttttagttagaggatggggtttttttagggtagaaaataaattataatttaatgatttagttgaatgaataaaatatataatatattattaattttagttttttttgaaatttatatttgtgaaaaataaaaaataaattttaagattgtatttggattttaattttttttattagaagtaattttttttaagggaaagaaggggggtatttttttatttatggttattgattggggtgttgatgttttagtataagaatttatatatttaatagatgatatttattatatgttattttaatttttttttgaataggtaggataagaataaatagtatgaatttgtggatttgtatagttacgtttattttttagtttttatttttatttaatttgtgtgtgtttttttatatttgttcgatttttgttttttttatattttaatgaataaatgtttttttttgtttttttaggtttgtgtttaaatttttttttttagtaagtttaaggtgttatttttttaggatttttttagttttgaatttttattatattggttaggtgcgaagtggttgaatgtgtatattattagatatttgtttgttttgagtaagttttcgtttaaaatatttggtttagatggttaatatttagattgtaggttgtttaataagtttaaaatatggtttttgttatttaatagttaaaaagttattttaattaaatgaaaagataaacgtagttgatttgttagatggttgggattgaataattgttagaattatttatattttttaaaagttaaaaataattattttaaaaaattgttgtagatggaaaggaagggttttgaggttagatattattagtttatttaagagtagttaggattttaagaaattgatttatgtaatttaaatatattaattttagaatgttaataaattagatgtaataggaaatatatagttttaatgattggaataataatatttaatatttagggtattttgtaatttatgttttattttaaggtttttggaaagttagtttagtaattataaggtagttttagtatataatgatagtaaatggtggtgaaatgttttgagagttgtgttatttatgttttttagttttggagagtttgggtaatttattatagggtagtattttttaaattaattttattggaattgagttgtgttaggtattatttatagatgtggaataattattttaaaaaataatttaaagttatatggttttattaaagttagatatagtataatttttttagtgttgtgatatttgattattatagattttttttttttttttttgttggggtgttgtttgtttgtttgttttgataaatgttttaagatgtttatagggggtttttaagagtggtggtgttttgttttttattgttttagaagtttttttttagtgattagaatatttttgtttatagaaagttatatttttttagttaattttttatgatattattattttagatttattgtaatttagttagattttagtttagttgttatttttttttttgagatgggggtttttttttgttatttaggttggagtgtagtggtgtgattttggtttatagtaatttttgttttttgggtttaggtgatttttttattttagttttttgagtagttgtttagtatgtttgatttgtttaatatattgtttgtttgtttatttatttatttttgagatagagtttagttgttgtttaggttggagtgtagtggtataatttcggtttattgtaatttttgttttttgggtttaagcgatttttttgttttagttttttgagtagttgggattattataggtgtgtgttattacgttcggttaatttttgtatttttggtagatatagggttttattatgttgtttaggttggttttaaatttttgagtttaagcgatttatttgttttggttttttaaagtgttgggattataggcgtgagttattgcgtcgggttattgttgttatttttttttttttttttttttttttttgagatagagttttgttttattgtttaggttggagtgtagtggggtgatttcggtttattgtaatttttaattttcgggtttaattgattttttagttttttagtttttcgagtaattgggattataagtacgtgttattatatttgattaatttttgtatttttagtagagatagggtttcgttatgttggttaggttggttttgaatttttgattttaggtgatttgttcgttttagttttttaaagtgttgggatgataggggttagttatatcgttcggtttgttttttaatatatttttagtattatgaattttggaaggtattagaatttataagtagtattaaatttttttttaggattttggttattagtgttttttgttgttatattgttataattttaaaaaaaggtggaaggtatttttttaagagtatattattttaatatgttgatttttattagttttattatttttattttataagttgggataaagagttttgttgttattatttatttttttttaaggtatgtttttttttttttataaaattttttataaattgataatgtttattatagttatgtaatgttaaaatttagtagtaagatagtatatgatgtaatatttaaaataatagattttattattttacgtttaatatagttgtattttataggagtttatatttattatttttaggtatttttattttttgaataagatgaaaaatatgagaaaaaaaatttaattttgaaattttttattaaaatttaataaagttagaatatataaaattgtttaatgttttttttaaaaagtttttttaaaaaaaattgaagtttttattttagatattgtatttgatgttgtatttatttatttatttatttaattaataaatgtttatggagtagttatttagaggtaagtattataattgaaatgatgatttaggttgagagtttgtttttaagttatattttaattttaagattgagtatttaggattatataggttttaagtttaaaggtattttaggtaaagttaataaaaattagttagtaggtttaaaaaaaatttaatatattttattttgatgatttttttttatgaaaaattgtttacgaaaaaaaaaaggtaaaaaatttttttatatttttttatgatttaaatttatttgtttagtataaaagatttttattgatttgatatttttttttttcgttttgtttattaggtgatttagttttttattgttattttttttgtgaagtttttttgaattttttttagcgttattttatttttaggtagagttaattattgtttgttttggtttattaaaggattacgttgtaattatttgtttatttattattttttttagttagattgggagtttatttttgaagatagagattgaatttttgtattttgagtatgagaatagtgatggagggaaggaggtgagttataggtatagagaatttattatatagtatttgaaataaataggttatttttttttaaggattttttgtttaattatttatatttaaaataagtaagatatatattagtgatgtgaagttattaattttgaatgttggaggaaatatgttattagggaagttttttattgttttatgtttaagttttttgattgaaaagtgtaaaagagtttttttttttttggttgggtttttgaaaataaggtaaaaatgttgagatgatttattgatagtgagattttatatagtaattttttttttaatttacgtttgtaatcgtaagataattataagaagatgataatatattgtagggatgaatagttttaaaagataggttaggtgttttattttttagatttttaggggttttaggtattaagtttttgattnttaattatatattttatatggtttcgtaagttatgttagatgttattagttgttattttattgattaattttttttatatgtcgttgtttgtatttttaggattagaataataggatttagagtagaaggaatataagaaaagttttttaaatatatttaattttggttaggataggggtttattttttttgtttaggttttttgaatgggtgtttttattttgatttgtttgaggatgttatttgtgattagagaagatgattatttttgatttaaaaagtagtttaatatattttttgtgtgggtattaatgtttaatttttatatggatattatagtataggatttaagaatttggttagtattgagtatattgggttaaggcgggggttaggtgttagtaatataaagatgaatagtatattgagtggttagagtttaaggaaggtggtgaatgtgtaaataagtttagtagaatttaagtgttgtagtagttgtgggtataaaatgttatgttagtttatagaggaggtagtgattaattttgtttagggagagttattagggtgtgtggggtgatgaagagtagtgggagatgaaagtaaaaagagttagattaggtttttttattttatttcgtattattttttttttgggtaattgtatttatttttaaggttttattaattatttttttatttattagttaataatttttatatttgaaattttagtatttattttcggatttttttgattttaggtatatattttaatttgttttagaatatttttatgttttataggtattttatataaaatatattattttaatttttttagatcgtttttttttttatttttatttttatgaattttagtgttatttttttttatttttttttttattttatttttaagtggttattatattttgttaatttcgtttttaaaatttttttgaaatcgttatttttttgttattttagtttttttatttaggtttgtattttttttttttttaattattttaatagttataaaattagtgtatagatttaattttgttttaatttatttatttatttatttaataaattggatgtaaggtattatgggtattgtagtaaataaaatatataaagaaagtgtttgttttatggagtttttttttttattttatataatttttttttttaaattaatttggttatggtatatattggttttaagtgtttaatagttttttattgttaataggataaattagtatggtttataaggtttttcgatatatggtaaattttatttttttaattttttgttttgttatttttttataggtttttttaattttaggtatatttaattattttttttttattaaaattgtatgtgttagttaggcgtggtggtatatgtttgtagttttagttatttgggaggttgagataggagaattatttgaatttgggaagcggaggttgtagtgagatgagattatattattgtattttagtttgggtgatagaatgagattttattaaaaaaataaataaataaataaaaaaatttttaaaaaattgtatgtgtttttttaggttttattattttggtatatgttgttttttatggttgaaatatttttttttttttttttttttgggaatttttattttagagattttggttttttatgtttaattataaattttattatatagtatgaaaattatgtcgagtcggttaggtacggtggttaacgtttataattttagtattttgggaggtcgaagttggcggattacgaggttaggagattgagattattttggttaatatggtgaaatttcgtttttattaaaaaatataagaaattagttgggtatggtggcgggcgtttgtagttttagttatttgggagtttgaggtaggagaatggcgtgaatttgggaggcggaggttgtagtgagttaagattatattattgtattgtagtttgggtgttagagtaagattttgttttaaaaaaaaaaaaaaaaaaagaaaaaaaaaaagaaaattatgtcgaatttgtttttttttatttagttgtgagttgtgagttttttgaaggataggagttgtattttatttattgttgtgtttagtatgagagtggatttttagtttttatttagtaagtttttgttgtataagaaagtaaggaagaagtagagaaatttgataaggttaagaagtaaaagttaggaaaatagagggagtttaaattttatttgatgatttgttttaagtatttattttgtgatatattttgttttttttttgggatttgaggatagagttttttttaggggtgtttttttaaagtatagtataaaaagttagattttttttttgtttttagtttgggtatagaaaaaggttttttttnattaantaaataaataaataaaaaaattttttaaaaattgtatgtgttttttaggttttattattttggtatatgttgttttttatggttgaaatattttttttttttttttttttttgggaatttttattttagagattttggttttttatgtttaattataaattttnttatatagtatgaaaattatgtcgagtcggttaggtatagtggttaacgtttataattttagtattttgggaggtcgaagttggcggattacgaggttaggagattgagattattttggttaatatggtgaaatttcgtttttattaaaaaatataagaaattagttgggtatggtggcgggcgtttgtagttttagttatttggaggtttgaggtaggagaatggcgtgaatttgggaggcggaggttgtagtgagttaagattatattattgtattgtagtttgggtgttagagtaagattttgtttttaaaaaaaaaaaaaaaaaaaaaaaaaganaattatgtcgaatttgtttttttttatttagttgtgagttgtgagttttttgaaggataggagttgtattttatttattgttgtgtttagtatgagagtggatttttagtttttatttagtaagtttttgttgtataagaaagtaaggaagaagtagagaaatttgataaggttaagaagtaaaagttaggaaaatagagggagtttaaattttatttgatgatttgttttaagtatttattttgtgatatattttgttttttttttgggatttgaggatagagttttttttaggggtgtgttttttaaagtataatataaaatattatatttaaataataatattattaggtaaatagtaggattttttttttttattttttttaatgtttcggatttggttggagaaaaatatatagttatggtgattggttttattttaaatttatgattattaattttaagtgggttttaaatggtatttagtaatttaatattttttttgtttatttattagagtattttatgttttttgtttttatatttatttttagttgatgatttttttttttattttattttgaaaatagatataattaaaagatttttttaagtttttattatattttttgaagttggtgtttatatattttgttattacgtttgttattagggatgaattgtgtttttagttaagattaaattattttttattgggtaatagattttatttttttttgtttaaaaattattttagtaattttattttttgtttcgatttattaattttttttttttttattagattatttttgttaatttaaaaatatgttttaattttttttataaaaagaaaattaaaaatgttaaatatttatatttttttttaattttagttattattttatgatttttttttttaaaaatttttagttattttaatttattttttttattttttattttttttgaatttatattaattaggtttttatttttaatatttttaaaattgttttttttaagtttattaaagatttttatttatttaaatagtataatatagttgattatttttttttattgaatattttttttatttggtttttaggatattatttttttttgttttttttttttattttagtaggtattttttaatagtttttgtttatttttttttatttttttagttttataatatttgtatgtttagggtttagttttttttattaatatatagtttttggtattaaatattatttatatttatagttttagttcggggagattttaattttgaatttatatatttaattatttatttaatatttttatttggatattaataggtatgtaaaaatttaatatgtttaaaattaaggtttatttttgtaattttagtattttgggaagttaaggtaggaggattaattgagtttaggagattaagattagtttggaaaatatagtgagattttgtttttataaaaaatatataaaattagttacgtatagtggtaaatatttgtggatttagttatttaagaggttaaggtgggaggatggtttgagtttgggaggtaggttgtagtgagatgtaattgtattattgtattttagtttggtaatagggtaagattatattaaaggaggggaagcgaggggaggggaggaagaaggaaaggaggaaataaaagaaaattaggagtttattttttaagtatttaagttaaaataattggagttattattggtttttttttttattttatattttgtatttaatttgttattaaatttaattggttttattttaaaatataattagaatttaattattttttattatttttattgttaaattttatttaaaatgtaatttaatttttgttaacgtataattagaatttaattacgttttattatttttattttttataatattataattattgtaatattatttaatattttttatttttaatgttattagttatagtgatttttttataatttaagtaaaattgttatttgattttttaaattttttaatggttatttatttcggtaagattaaaaatttatgataaggtttataaaatttggttattttttgggtttttgttttaattttttttttatttttgtttattcgattttagttataacgattttttttttatttttcgaatatattttttattttagggtttttttaattgttttttattttgtttagaagattttttttttaggtatttacgtgatttgtttttttatttttagttttttgtttagatgttatttttttagtgaggttttgtttattttatttaaaatgataatttcggttaggtgtagtggttaacgtttataattttagtattttgggaggtcgaggtaggcggattatttgaggttaggagtttgagattagtttggttaatatggtgaaattttgtttttattaataaaataaaaattaattgggtgtggtggcgggtgtttttaattttagttattcgggaggttgaggtaggagaatcgtttgaattagggaggtagaggttgtagtgagtcgagatcgtgttattgtattttagtttgggtaataagagtaaaattttattttaaataaaataaaataaaaattttttttaattttttatttttaatttttttttattatatttattattttttaatatattgtttattttgtttaatttatgttgtttattgtttatttttttttatttgagttttatgagagtagagatttttatttgttttatttatagttgtattttttaggttaagaatagtgttggtatatggaagtggtttaaaaggtgatttgttgaatgaataaaaaaagaaatttttagtttgttgttacgtttttagtatttaatatttgttaagttttttttaggggtttagtgatttggtagataaaagtattaagttagaatttattaatattaaatcgaaatgttttgtttttattttgttttttgattattttttatttaagatattggattttatttttttaataaaataatttttaatttaatatatgtttttaagtttaaaaagtgaggtttttttaagaaaagttttaagaaattattatgtaattagtataggtatagggtaaaaattgtgaatgtggtatttgaacgattgaaatttaggaatttttttcgaatagggttgttagataaaatataggatatagttaaatttgaatttttaatgagtgatttcgttgttgttttgttgtaaggatgttttaaatattgtattggatatatattaaaaattattcgttattttaaattttattttaattggatattatttttaatttttgttaaatatggtaattttatttaggagaataaataaattgtattcgtttgtcgttttaatttcgatttattataaatagttaatataatttttgttttatttattaattgcgtggtttttatgttttaataaatatgtttttgtgggcgggtattgaggttcgatattttaaaaataaggaggtaaagatatatagtgtattttgcgaggggaaaggtttttttcgtagtttagaaaaagaggtcggtcgtattagacgtaggttatttcgggtttagttttttttttagtttttgtcgtttgcgtggcggaggttaaggtttggtagtcgtttttcggtttttattaatgttgttttcgatggagagttttcggggttcgcgtttcgcgtgtaggtttttggaggaggaaacgttttcgagtgggtttttggttatggaattgaagggtgttcgaagtcgatttagaaagaggcggttcgcggttattttatttacgatttatatagcgattattttcgtcgagagtattttcgttttaggtatcgttgtttattcgttttagcgtatcgttgacgtaaggagatcgttagataggaagtgggtggggttgaatatgcgacggggtgcgtttaagagatcgtttcgttatcgcgatgtttgtaaagaagcgttgagtgaaggaagttttgtaacggtgtagaatttgatagtaaaaggagttgcggtgcgagtggtttttgtttattggataaataatattttaaaagacgtaattttataatttaattattttatttttgtataattttaaaataaattttataattgaagataaaattaaaaatagaaattgtaattttaagaggggattttttttttttaggtgtttgttgtttggtttttattttaatatcggaagaaaatggaagttttaaagtaggaaaatgatttaatttgatgatttatataaatttaatttttttttattttttgtaatttttttgtataatgttggtatattattgattaaattaataaattagataattagttatattttattttttagtttgtgttttgaataagtaaataaatgttcggttaatcgatttgtattatatttaaaaatttttttaggataaggtggtggtggtttaggtatgtgattggaaattgtttaaatttggtaggttgggtttttggacgtaagtaatggcgagtagagatttgtataaaatttgagttttgttgtcggtgaagtgtgttttgtaggagggtagggatttaagttgttgttataggtgaagtcggattgttatatttcgtcgttataataattttagaagtaatgatttataaaatgttgttaaatggtgtttttagttttaatcgtttaaattattaatagttaaaattaggagttaataggttaaatcggtttttaggtagcgtttttaggtgtggtaggttttagaagataaggatttgattgtaagggggttggggaggggtcgggggttgggatatttgttttgaagttgtttttataaaaagtacgggattttttttttatgttgatgtatatataggatggttgaggttatgtttatatattaagaattttttttttaatcgaattttttaaggataattagggtggggcgttaatggttattggagcggttaaagttttatttatttttatttttattttagtagttatttttgttaaaataaaataaaataaaataaaaaaaaaaaataaaaaaaaattgtttatatttttttatttatgtaaatttagatttggaaaatatttatttaaaaaagtttgagaggttttttgtttcgttaggattttgttgttttaggggtgttgtgaaagttaaatgaggaagttgtttgtaggtaggtattaattttttaaaagttacgaggtaggaaaatagggtttggagatagggaatttaaggtcgatttaggttgattttttagaattaaattaaaaggaaaattttaattttttagtttaagtaataaaaggattagaagttaattttttttttgggtggtagataaaaaattgaaagtatttttgattggttttcgcgggtaattagttaggttggtggtaggttaagtttttagttgtatggggtataattttataattttattttagtttttgattggtttttttttgtaattaattagattgatcgttggttattattttatttatatagggtgtatattaggtaattaatgggaaatttttagaaggtatttaaattttagaaaattttgtaattgttgtttgtttgggttttttttatcggaaggagtgttttttgatgtataataaatttgtgtttttgttgttttattgtttttttgttttgtacgttttgtttaattttttgtttaaaatgttaagaatttgggtattttttattagtaatagagtttttaaaaattatttttaaaaattttatggtgaagtggtttggcgcggtggtttacgtttgtaattttagtattttgggaggttgacgagggcggattacgaggttaggagattaagattattttggttaatatggtgaaattttgtttttattaaatagagagaaaaaaaaaaaagcggagtgtggtggtgggtttttgtagttttagttatttaggaggttgaggtaggagaatggtttgaatcggggaggcggagtttgtagtgagtcgagatcgcgttattgtgttttagtttgggcgatagagcgagatttcgttttaaaaaaaaaaaaaaaaaaaaaattatggtaaagtatagtatgtagtgaggaaaagaggatgtgttgtgtagtgaggaaaagaggatgtgttgtaagtgtatagtttaatgaagtttttataaatggaatgattgttatttggatttagattaagaaatagtattattcgtatttttagaattttttatattcgttgttagttattattttttaaagataattattagtttgattttaatagtagagattagttttgcgttttttttatataaatggaattatatagtaaatattttttttatttaatatatttgtgagatttatttaggttgaatgtattagttgtagtttatttatttttattgttgtatagtatttataaatgttattatattataatgtattcggaagtttttagatttgagttataatgaatagtgttgcggtaaatatttttgtatatgttttttggtanaaagaagtatgtattttttttgggtgtataagtaagattggaattgttgtgtaataagttatatatatatgtttagttttgatagatatttttaaatagtagatagttttatagtgtttgttttagttgatattgttattattagtgagagagagttttggtttttttatatttttattaatagttgatattgttagttttttaaattttatttattttgttgtgtgtaattataatttattgtggttttaatttgtatttttttgttgattaatgaagttaaatatttttttgtatgtttattggttattttagtattttttgttgaagttttatgtttatttttttattggttgttttttgtttgttttattttttaaatattttggatgagttttttgtgaatattttatttttgtggtttgttttttttttttttttttttttttttttttttttttttttttttttttttttttttttttttttttgtgttgagatagagttttttgtttaggttggagtgtagtggggtaattttggtttattgtaatttttattttttagatttaagcgatttttatgttttagttttttaagtagttgggattataggtatgtgttatgttcgattaattttttgtatttttagtagagacggggttttgttatgttggtttggttgtttttgagtttttggttttaagttatttatttatttttgttttttaaagtgttgggattataggtatgagttatagtatttagtttttaaaaatatttaaaatttttttgatgtagagtgtaatgtaagaaattaaaatattttttgtttaagttgtttgttagttattttaatttattagtaataatttttttatttttttttagttatttatgtttgttttgttaaatgttttttatttatttaggttttaattttaaatttttagaagggagaatttgattggtttagttgtgtttaggtatttaattatggtttaattagttgtggttaaggaagagggttggggttttatttttgtatatgaggaagtataattaaggggatttttatgaggaaagaagatattttaaagaggtggtgattatttttttttcgaagtagtaaatacggagtttttattttatttgggtgttagttagaagattgaaagtagtggtatattggtgagtagaattattttttttttatttgggagaacgaggttattttttgtttttgggcgattttgttttgggtaaaatgttgttttgtaagaattttagttatttagtatttatttatttatttaatatttgttgagtatttattgtatgttagatattttgtttagtttttgaagtgtagttttgaaggatttattatttttttagtgtttttaaatgttatcgtatatataaaatattgattaatattatttaaaatgttatgtagttattaaaaaagggagataaatatataaaaatgtggtttaaattttattttgtagtttggatttttagttagttatattttatttattttgaagattttataatgtgttggattgtgttaaatcgatttggttaaattggaaagtatatttttagaacgttttattaataaggttttgagttagagttggttaaaagaggatttggggtgagatttggaaggtagagtgggagtgttagttatttttttgtggaaattttttagttagatgttatgatagatagaggtgtttagtagataggttttatttagttttttatttatttgtgattttttttggagtattttatagttttttgtagatttttatttttttagtttttttagtttttggggaaagtgttatttttgtaataaagtttttatttttataatatttataatggttttgtttttttgaatgaattgtattgatatatttaattataaagggagacgtattaaaaggtggttaatagtgtgggttttggattttagtgatttgggggtgaggattaagagagagaatttatttgttatatttgttatatagttattatttaatagatattatataatatataataagtaatggttgtttttttaggtttttagtgtttgggatattgtttttttttttttttttttgatagggtttcgtttgttagaggttggtttgaatta

SEQ ID NO: 59 - DNA, 5933 bp, Artificial Sequence
  chemically treated genomic DNA (Homo sapiens)
taaaagtttttttttttcgtggattttaggtataaaaaataatttgttaattgaagagttaagaattgaggtggatatatataatggaatattgtttggaaataaaaaggaatgaatgtattatagagtagttaaaatgatagagatagaaagttgaatggtaggcgttaggggttgggggaagggggttatagtgagttagtgtttaatgggtatagagttataggaatgtaagataaaatgagttttggagatggatggtggtggtgggtgtataataatataaatgtattaaatatttttgggttgtatatttaaaaatgtttaggatgataaattttatgttatgtatattttattataataaagaaaatgaatatttttagaaaagggaatgaagtattgatatatgttataatacggatgagttttgaaaaatattatagtaattgtaagaaattagatattaaaggttatatattgtatgattttatttatatgaaatgtttagaataggtaaatttatatatagaaagtagattagtggttatttagggttggggagtgttggggtagaattaggaggtggttgttaatgggtatagggttttttttggggtgatgaaaatgttttaaaattgattttgatgatggttgtataattttgggaatattttaaaagttatcgaattgtgtatgttaaatgggtgaattatattgtataattgtattttttttttttttttgagatagaattttatttcgttatttagtttggagtgtagtggtacgatttcggtttattataatttttattttttagatttaagggattttttcgttttagttttttgagtagttgggattattggcgttcgttattatattcggttaatttttgtatttttagtagagatagggttttattatgtgggttaggttggtttcgaatttttgattttaggtgatatatttgttttggttttttaaagtgttgggattataggtatgagttatcgtgtttggttttaagaattatattttaataattttgttattagaaaaaaataaaaataaaaaatttgttaggtatgatggtttaggagtatagttttagttattgaagggttgaggtaggaggatggtttgggattaggaatttaagattaatttggttaatatagtaaaattttgtttttaaaaaatatatatatatttttaattagttaggtatggtggtatgtatttgtggtttttgttattaggaagttaaggtaggaggatggtttgagtttaggagtttgaggttatatgagtaatgattttgttattatattttagtttggatgatagagtaagatttgtttttaaaaaataaaataaattgaagtggaatagttatttagtttttgattagtgaatgattttttttttttttttttagtgttatttttaataagtggtaaaggttttattttaaaatatgttaagtgtgttgttttattttaataatattttattttaattgtttttatgtggttttagttaagttatttaattgtgataattattaattttttttatttattatttatttttttttttataaaaagagaataataggtcgggtgtagtggtttacgtttgtaattttagtattttgggaggttaaggcgggtagattatttgaggttaggagtttaagattagtttagttaatatgtaaaattttgattttattaaaaatataaaaattagttaggtgtggtggtacgtatttgtaattttagttattcgggaggttgaggtaggagaattgtttgaatttaggaggttatagtgagtagagattgaatttaggaggttatagtgagttgagattgtataagtgtattttagtttgggtgatagagcgagagattttattttaaaaaaaaaaaaaaaaaaggggtaaaaagtatttttaggaaaaataaatgagttataaaaagtttttagaataaaaattagaggtgtttatttagtgtttgtagatttaaaaaatgggtttatgtagaataattaagtaatgaaaggtaggttgttttagaattgtaatattaatcgtggtaaatttttttaagttacgtttttttgtatgatttttttagaaaggtgaagttttagatttatttttttttttagttatatatttttatttttgtagttattttatattaacgtttttatgttgattttaaaatttaaattttattttttatggaaggattaatattttatatatatttttattggatagatatttttatttgaattgggattttttttttttttattttttttatttaattttttgaggataatgaataaagatggattttttgtttttttttattataaattttttgatattataaaattagagaaaaatttgtttaattgtttatatgtaatattatttttagaaatttaggaatttaggtatttaggtaggttgggtttttatttatttttgtgttgttttttgtttgttttttgttttgagatagagtttcgttttgttgtttagggtggagtgtagtggtataattttggtttattgtaattttcgttttttgggtttaagtgatttttttgttttaattttttaagtagttgggattataggtaattattagtacgtttaattaatttttgtatttttagtggagatgggattttattatgttggttaggttggttttaaatttttgattttaggtgatttatttgttttggttttttaaagtgttgagattataggtgtgagtttttgcgtttagtttaggtatgttgtttttatttaatgttttttatatatataaagagtagttttaagtaaaaaaaagcggggagagtagatttgtaggttttgatattgaaaattgtttaaaatttttttaatagaaaattttattaatagtagaaaaagatagtagtaaattagtataaaatataatataatttgtgaaatatatttaaattaatttttgagtttatgattatgtatatatatatatgtataatttttaaaatttggaagtatatatagaatattaatagtagtgggttttatttaaagggagggattatggggtttattattgtttattttttatatttttgtattgtttgaaatttttgtagtaagaatgttttaattttataattaggataaaaatagttagaaggaataaaggagaaagttgggagaattatagttaaattgtagaattttagttttattatttttttaattttttatatatattattattatttatagggggttattttgtttaggaataaaagggatttttttttataaagaaaaaagatataattttaataggtttttttgttttttggagaattttagaatattagggttatgattgaggagaaaaaagaattttttataatttattagagttgttagatatttttagattattttttttttttttttgttggattttttttattttttttttaataggtttattattttttaatggtttttttttttttttgttaatttttgtagtttatatcgggaaggttagaaaatgatgtgttatttttattttgagaaggtttgacgtatgtgaattaatttaaattttataattgaatgataaggttttttgttatttattttttaaagaattttttatttttagttttggaaaattttatgggtgaattgtttttaatattataaaagataaggtagagtttgatagttaggagttttagtaatttaagtcgtgtttagaattaattgaaattaaggttgttatcggttttgatttaatgagtttttagttttttttaattataaaatttgaattattttatttatatatgttaaataaaatatttttaagaaataaatagttatgtagtaaaggtatagaggggaaaagataggtaataaaagaatagtattatttttgatatgtttattgtaatttaagtgttttttgtttaaaaggtttatgtttattattaaagatgtgataagattatgaatttttttttggtagaaaatttgttaaaagtatatataagttttttattagttattttttaaatggtgggtgtaaaattttggtgaatttatgaaaacgtagttcgtttttaaaaaaaatagaagaggagtaattattttaagggagaaatatatacgaaaggaataagattttgaagtatttaagttgttatttatattaaaatacggtaggtggttaaatattagtttttaatgtttttttatagttttagtttgaaaaatattgtgtaggtgatttaagtgaggggttatttttgggttttttttgtggtagtatttttggtttaaaaataaataaacgtatttattgcgttgaaggacggtaataggaaggattttatgattagttatatttatattattttaagaaattttatttatttaaattgtattttagattttataatttaaattataaaaagtgtttattggggaattgtataatatgattgtttttaatcgtagtgattttaaatattgagttatgttgttgtagttttaaaaattggagatttaagggtagtttttttttagttatttaatttagtatttttttaaaaaattagtaaaatttttcgattattaaggaaaaaaaaaaaggatggaggttaaaagacgtattttttgtttataagtttttttattagaatgggagttaggagatttgagtttttgttttaggtttgttattaaaaatttgtataatttttgtttatttttttaaacggaagtattaaaattttagcgttttatttaatttgtagtttcggttgggttttttttattttttttttttttagttcgttttttttttttttagttttattatcgggcggagggtttacgttttcgttcgttttatttataagtttcgtttttttagtttcgatggttttgtttagttttagatagaatttattacgtgcggcggtagttggggcgggaaggcgggcgttgggggcgttgcggtcgttgtagcgttagggtttatttggtcggttgtatttgtggaggaggaggtggattttaggtttttcgtagattggaagaatcggtttaaaatcgtttgtttcgtaggggttgagttggaggtagcgaggtcgttcgacgtaggttttcggcgagatatggtagggtaaggatggtagttcggcggtagggttcggcgaggagcgcgaattcgcggtcgtagtttttaggcgtttgcgggcgcgagtacgtcgcgattttgcgtgcgtcggggcgggggggcggggtttcgtttgtataaatagggacgagggggcggggcggttataatttcgcgttaaatttgatcgcgcgttttgttgtaacgagcgggttcggaggttttttcgttgttgttatggttggttcgttaaattgtatcgtcgttgtgttttagaatatgggtatcggtaagaacggggatttgttttggttatcgtttaggtatttgtcgggtcggggcgatgggatttaaacgggcgtaggttgtttacggtcggggtatttgggcgggacgcgttaggtcgattttcggcgagaggatggggttagatttgcggtttgcgttggtaggaagggtgggtttcgattggattttttttttttgttgcgcgggaggtttagttgttgatttttgttcggattttgttgttcggtgaggtttttgttttgcggcgttttcgtttagggtaaagttttagttttggagaaaatattttatttttatttatagcgtttcgtttgttaggtgttttagagttcgagtttaagggataatgtttcgagtaacgttgtttttttaatttgtagg

SEQ ID NO: 60 - DNA, 5933 bp, Artificial Sequence
  chemically treated genomic DNA (Homo sapiens)
tttataagttagagaaatagcgttattcgaaatattattttttgggttcgagttttaaggtatttgataaacggagcgttgtgggtaggggtgaggtgttttttttagggttgggattttgttttgggcgagggcgtcgtagggtaaagattttatcgggtagtagaattcgggtagaaattagtaattgggtttttcgcgtagtagaaaaggggaatttagtcggggtttattttttttgttagcgtagatcgtaagtttggttttattttttcgtcgggagtcggtttggcgcgtttcgtttaggtatttcgatcgtgggtagtttgcgttcgtttgggttttatcgtttcggttcggtagatatttgagcggtggttagggtaggttttcgtttttgtcgatgtttatgttttgggatatagcgacgatgtagtttagcgaattaattatgatagtagcgggaggattttcgagttcgttcgttatagtagaacgcgcggttaagtttggcgcgaaattgtggtcgtttcgttttttcgtttttatttgtgtaggcgaggtttcgttttttcgtttcggcgtacgtagggtcgcggcgtgttcgcgttcgtagacgtttgggaattgcggtcgcgggttcgcgtttttcgtcgggttttgtcgtcgggttgttatttttgttttgttatgtttcgtcggaagtttgcgtcgggcggtttcgttgtttttagtttagtttttgcgaggtaagcggttttgagtcgatttttttagtttacgggaagtttgaaatttatttttttttttataggtgtagtcgattaggtggattttggcgttgtagcggtcgtagcgtttttagcgttcgttttttcgttttagttgtcgtcgtacgtagtaggttttgtttgggattgggtagggttatcggggttgggggggcggggtttgtgggtaaggcgggcggaggcgtggatttttcgttcgatgatagggttggaggaggaaggggcgggttgaagaaggggaaggtgggaagagtttagtcggggttataaattgggtgaagcgttgaggttttagtattttcgtttgaggagataggtaaaggttatgtaggtttttaatggtaggtttgagataggaatttaggttttttgatttttattttgatgagggggtttgtgggtaaggggtgcgttttttaatttttattttttttttttttttttggtggtcgaagagttttattgattttttaaaaaagtgttggattgggtgattagaagaaagttgtttttaggtttttagtttttaagattgtaatagtatggtttaatatttgaaattattacggttaaaagtagttatattgtgtagttttttagtgaatattttttgtagtttagattataaagtttgaaatatagtttgggtggataaagttttttaggatggtatagatgtgattaattatggagttttttttgttgtcgttttttaacgtaataagtacgtttgtttgtttttaaattagagatattgttataggaaaagtttaagggtgattttttatttgggttatttgtatagtattttttagattgaggttgtggaagggtattgaagattggtgtttagttatttatcgtgttttaatgtaggtggtagtttgggtgttttaaaattttgtttttttcgtatatattttttttttaaaatgattattttttttttgttttttttgaggacgagttacgtttttatgaatttattaaaattttgtatttattatttaaagggtagttggtgaaggatttatgtatgtttttggtaagttttttgttaagaaaaaatttataattttgttatatttttagtgatgaatataaattttttaaataggaaatatttaaattgtaatgaatatgttaaaaatgatattgtttttttattatttatttttttttttttgtgtttttgttatataattgtttattttttagaggtattttatttagtatatgtaagtagggtgatttaagttttataattagagaaagttgaaggtttattgaattaagatcggtagtagttttggttttaattaattttaaatacggtttgagttgttgaggtttttgattattagattttattttgttttttatggtgttaaaaatagtttatttatagggttttttagagttaaaagtagaggattttttgaagagtggatggtaaggaattttgttatttagttgtaaagtttaaattggtttatatacgttaggtttttttagagtagagataatatattattttttaattttttcgatataggttatagaaattgatagaagaaagaagagattattggaaaatgatgggtttgttaaaaagaaagtaaagaaagtttaataaaaggaaggaggaagtgatttgggaatgtttggtaattttggtgagttgtgggggatttttttttttttttagttatggttttggtattttggaattttttagagggtagaagagtttattagaattgtgttttttttttttgtggagaaaggttttttttgtttttgagtagagtggttttttataggtgatggtgatgtgtataggaggttaaggggatggtagagttagaattttgtaatttagttgtagtttttttaatttttttttttattttttttagttatttttgttttggttataaaattaaaatatttttgttatagaaattttaaatagtatagaaatgtggaaggtaggtagtgatagattttataatttttttttttgagtgaggtttattgttattggtgttttgtatatatttttagattttaaaaattgtatatgtgtatatgtgtatagttataagtttaaaaattagtttaaatatattttatagattatattatattttatattaatttgttattatttttttttattattaatagaattttttattaagaaaattttgaataatttttagtattaggatttgtagatttatttttttcgtttttttttgtttagagttgttttttgtgtatgtaaaaggtattgaataaaaatagtatgtttaggttgggcgtaggggtttatatttgtaattttagtattttgggaggttaaggtaggtggattatttgaggttaggagtttaagattagtttggttaatatggtgaaattttatttttattaaaaatataaaaattagttgggcgtgttggtagttgtttgtaattttagttatttgggaggttgaggtaggagaattatttgagtttaggaggcggaggttgtagtgagttaagattgtgttattgtattttattttgggtaataaagcgagattttgttttaaaataaaaaataaataaaaaatagtataaaaataaataaaaatttagtttgtttgagtgtttgagtttttggatttttagaggtggtgttgtatatagatagttgagtagatttttttttagttttatggtattagagaatttgtgataagggaagataggaaatttatttttatttattatttttaggaaattaggtaaagagaatgagaaaaaaaaaagttttaatttagatagaggtatttgtttaatggagatatatgtaaaatattaatttttttataaaaggtaaaatttgaattttagggttaatatgaaagcgttagtatgaaataattataggaatggagatgtgtggttaaggagaaaagtaaatttaaaattttatttttttggaggggttatgtaaggaggcgtgatttgagagaatttgttacggttaatgttataattttggggtagtttattttttattgtttgattattttgtatagatttattttttaggtttataagtattgaatgagtatttttgatttttattttagaggttttttgtagtttatttattttttttaagaatgttttttgttttttttttttttttttttttgagatagggtttttcgttttgttatttaggttggagtgtatttgtgtaattttagtttattgtaattttttgggtttaatttttgtttattgtaattttttgggtttaagtaatttttttgttttagtttttcgaatagttgggattataggtgcgtgttattatatttggttaatttttgtatttttagtagagttagagttttgtatgttggttaggttggttttgaatttttggttttaagtgatttgttcgttttggttttttaaagtgttgggattataggcgtgagttattgtattcggtttgttgttttttttttatagaggaagaagtgggtgatagatgaagagaattgatgattattatagttaagtaatttaattaagattatatggggatagttgagatggaatgttgttgaaataagataatatatttggtatattttaaaataggatttttgttatttgttaaaaatggtattaaggaagaagggggaggattatttattagttagaagttgggtgattgttttattttagtttattttattttttagagataggttttattttgttatttaggttggagtgtagtggtagggttattgtttatgtagttttaaatttttgggtttaagttatttttttgttttagttttttagtagtaaggattataggtgtatgttattatgtttggttaattaaaaatatatatatattttttagagatagggttttgttgtgttgattagattggttttgaatttttggttttaagttatttttttgttttagttttttagtagttgggattgtgtttttgagttattatatttggtaagttttttgtttttgtttttttttaataatagaattattaagatatagtttttggggttaggtacggtggtttatgtttgtaattttagtattttgggaggttaaggtaggtgtattatttgaggttaggagttcgagattagtttggtttatatggtgaaattttgtttttgttaaaaatataaaaattagtcggatgtggtggcgggcgttagtggttttagttatttaggaggttgaggcgggagaattttttgagtttggaaggtggaggttgtagtgagtcgagatcgtgttattgtattttaagttgggtgacggagtgagattttgttttaaaaaaaaaaaaaagatatagttatataatatgatttatttatttagtatgtataattcggtggtttttaggatatttttagagttgtgtaattattattaaagttaattttagaatatttttattattttaaaagaaattttgtgtttattaatagttattttttagttttgttttagtattttttagttttaggtaattattaatttattttttgtgtatagatttgtttattttgaatattttatataaatggaattatataatatgtggtttttggtgtttggttttttgtagttattgtaatgttttttaaggtttattcgtgttgtagtatgtattagtattttatttttttttttaaaaatatttattttttttattgtggtaaaatatatataatataaaatttattattttagatatttttaagtatatagtttaggggtatttagtatatttatattgttatgtatttattattattatttatttttagaatttattttattttgtatttttataattttgtatttattaaatattgatttattgtaattttttttttttagtttttggcgtttattatttagttttttgtttttattattttggttattttataatgtatttatttttttttatttttaggtagtattttattgtatatatttattttagtttttaattttttaattaataagttattttttatatttgggatttacgggggaaggaaattttta

SEQ ID NO: 61 - DNA, 12951 bp, Artificial Sequence
  chemically treated genomic DNA (Homo sapiens)
tttttttttttggtgaggtgagtttttgttatttaggttggagtatagcggtgtgatttcggtttatcgtaatttttgttttttgggtttaagttatttttttgttttagttttttgagtagttggtattataggtatgtattataatatttagttaaatttttttgtatttttagtagagatgagttttgttatattggttaggttggttttgaatttttgattttaagtgatttattcgtttcggttttttaaagtgttgggattataggcgtgagttacggtattaggtttagtttagtttttttacgtttttttgtttgttttatattttggtcgtattggtagttgattagttggtgtttatttagattgaggatgggttcgttttttttagttttattgatttaaatgtttattttttttggtaacgtttttatagatatatttaggattaatattttgtattttttaatttaattaagttgatatttattattaattattataaggtgtgagttttgtatttagtaatatattgttttttatatatttatagaaatttaattggttttgtttttttggaaaattttgattaatatatatttttttattttttttatagtattgaattatgggataaattaggttggttgttttgtagaatgttttatattgtgatttgattgatatttttttatgattttaatttttattttttgtgttttttaattaatttatttgggtttttgttttttttttttgtttttagatagggtgttattgtgttgtttaggttggagtgtagtggtatagttatagtttattatagcgtcgattttttaggtttagatgatttatttattttagttttttgagtagttggatttataggtgtatattattatatttagttaatttttaatttttttagagatggtagaggtggggggggttggggggggttttattatgttgtttaggttggttttgaatttttgggtttaagcgatttttttgttttggttttttaaagtgttgggattataggtataagttatcgtatttggttttaaataatttattttttttatttttttagtttttgtttttatttaattttttatttttattttagtttttttaggaatttgagtttttggatttttttattttttttttgttaataagtttttttataatgttcgttattattttaattattttattttttaaaaatggattttgttgaggaataatatgtatataataaaatgtttgtatttaaaatgtattttttagcggattttaataaatatatatatttgtgtaattatcgttattattaagtcgtttttttttttatagtttttattttgtttttttttattatgtttttttaatttatattaattttttagatttttttttttttggtacgtttggttgtagatttgtaggagagaatatatacgtcgatttgttggaaatttgtatattagtattgttttttcgaggattttcggtttttgtttaggtagtagtgttcgtttatgttttatagtagtttttttttttttttttttttttgagatggagtttcgtttttgttgtttaggttggagtgtagtggtataattttagtttattgtaatttttgttttttgaatttaagcgattttcgtgttttagtttttcgagtagttgggattggaggcgtttattattatatttagtttatgtttttgtatttttagtggagacggggttttattatattggttaggttggtttttaatttttgagtttaagtgatttattcgttttagttttttaaagtgttgggattataggtttgagttattgtgttcggttagtaagttttttttttttttttgagataggatttttttttgttgtttaggttggagtgtagtggtatgattttggtttattgttattttaaatgtttgtttttattattgtgtagtaataaatttggttaggagtggtggtatatatttgtaattttagtattttgggagattaaagcgggaggattatatgagtttaggagtttgagattagtttgggtaatatagtgagattttatttttattaaaaaaataaaaaaaaattagttaggtacggtggtatgtatttgttattttagttatttaggaggttggggtaggaggattgtttgagtttaagagtttgagaaaagtttgagtaataaagtgagattttatttgataaaatagtataaaaggacgttttaaaaaagggttaggtaggtagttttgtttaatagaattttttttatttgtgttgtttaagtaaggtagttataagttttaagtagttattgagtattggaaatgtggttagtagttaggcgtggtggtaggcgtttgtgttttagttatttaggatttgaggtaaaaagatcgtttgagtttaggaatttaaggtcgtagtggtggatttaataaaagaaaaaaaggtcgaggttgtagtgaattattattatgtttttgagtttttaaattttaaatgataggagtgtttattttatttattgtgggttttttagattatttttgatggtttatgttaatgagatgatttgggatgggtttttatatagtttatgttaataagatgattgaggatgggaattggttatgttggaaattaacgatcgaatacgatatttgagttttgtggttttgagttttatttttggatgggttagggagattggtgattgagaaaataattttattagaagagtgagagatagaatagttagtatattgcggtttcgatttgaattagtttaggtttttttaaatattagtgatatgtggttatttaaatttaattaaagttaggcgtagtggtatatgtttgtaattttagtattttgggaggtcgaggtgggtagattatttgaggttaggagtttgagattagtttggttaatatggtgaaatttatttttacgaataatataaaaagtggttgattgtggtggtgtatgttcgtagttttagttatttaggaagttgaggtataagaattgtttaaatttaggagatggagattgtagtgagttaagattttgttattgtattttagtttgggcgatatagtgaaatttcgttttaaaaaataaatttttaaaaaattaatttaattataattaaaattttatttttttagtttattggttatttttttttttttaatttttatttttttttttttattgagtttattattgcggttttgaatttttgggtttaagcgatttttttgttttagattttgagtagttgggatataggcgtttgttattacgtttggttgttggttatatttttagtgtttaatagttatttgaagtttgtggttattttatttgggtagtatagatagggaaagttttattggatagggttgtttatttagtttttttttaaaacgtttttttatattattttgttagatggggttttattttgttgtttaggttttttttaaatttttgggtttaagtgatttttttgttttagttttttaaagtaatttgtaaatacgtgtaaataatatagtttttttttgttgtattaaaatgaatgtaaaaatgttacgatggggtcgggcgcggtggtttatgtttgtaattttagtatttcgggaggtcgaggcggtaggattatttgaggtcgggagttggaaattagttttttggtgtttttttaatttttgtattggagggataacggaagggttttgtgttatttttattttttttatttgtaatttttttgatggttaattattattttaaagttttagtttttttttttttatttattgagagtatatttttttttttatagtaatttttattttatagagttttttttgagacggagttttatttcgttatttaggcgggagtgtagtggtacgatttcgatttattgtaattttcgtttttcgggtttaagcgatttttttgttttagtttttcgagtagttgggatttataggcgttcgttattacgtttagttaattttttagtatagacggggttttattaggttggttaggttggtttcgaatttttgattttaggtgatttatttatttcggttttttatattgttgggattataggcgtgagttatcgcgtttggtttcgttttggttattttttaatatgtttttttataattgttatttttatattagttttgttttagtttatgggaaataaaattaattagtttttttattatttgttttgaggagtaggggtggtgtagtggtatgtatttagggaagtgtgttgtatgggtttttaagtgtagaatttgaattttgtaaaggaagaaataaattcgtttttacggagtatgtttttttaggatttttagttttttaaattcgtagttatagtgatttagtagaatttgagtttagggtattatagtaattcgtattcggttttttttttgttttatttcgtgttaaggttaaaagggtatgtttatttgatttttggatttttttgggacgatttttattttgtatttttttgtattttagggtatagtgcgtagatgggtttgttttagtatttttagttagatttttgaggtttttgttatatatatttttataatttttttttttagtttcgagagattttttttgatttttattagttgtttcggcgggtgagagtggagaggttttttttttattttttaggttttttttttttttggagttgtagttttagtatttttcgtttagtattttaggatttaggcgttgggtttcgtttttgtaggttgtttattttaaacgggtcggataggatatataagagagaatgtatcgtgtattatatacgcgatttttataaggttgtagtcggagtcgtttagtttatcgagagtttagtttcggttagggtcgtttcggtaattacgagtttagttaattagcgtttcggattgtattagagttatggtcggtgagtgttgtaaagggcggggtgtttggcggtcgtttttcgagtattggtgtttgtggaggaggttgtaggggtttggttttgaattttgttttttgatttaaaatttataaagggaagagattagggatttgggatgagttttgatcggatttcgggagaaggagagtttttgtttgtattcggtgtcgcggatttttttttattttattttacgaattttagtgggtatttaggagaaatttgattttggaagtagaaattttttttaaaattgtggttagaaattggtcgttagaggttaaattaggtttacggttatagtttatattttttttggtttatagtatttaaaatattttgaaataagttgttaatattaaaatgggtgattttatttaaaaatgtggatttcgagtttttgaagaaaatgagaatatttggcgattggtggataggagtggaggaaattgatgtttttggtttgacggagattagaatcggttttaggttgttaggtataggttttgttttgttttgttttgttttgtttgagacggagttttgtttttgtcgtttaggttgtagtgtaatggcgttattttagtttagcgaaattttcgtttttcgggtttaagcgatttttttattttagtttttcgagtagttgggattataggagtgcgttattatgcgcggttaatttttatatttttagtagagacgggtttcgttaagttggttagcgcggttttgaatttttgattttaggtgatttatttattttagtttttttaagtgttgagattattgacgtgagttatcgtgtttggttttgggaggtattttttattgaggtttttggattaggtaaatttgattagatcgtattggattcgtttttagtattgggtttattttagtgatagagtttttttattcggttatcgattttaggggaatttagaggttattttagttttatttaaggtataaataattagttgagataattgtagggattgagagttgttttttaaataattttattttgagattggatagtattaagatttagaaagttgttgttttatttggggtagaattttgcgttttgtaatttttttttttgtggatttggttttgtttttaaaaatgcgtttgtatataaagaagtttattttggttaaagtgagtggaggaatagattgtttttgtagttgataaattgaaattattaggatttttgagaaagggattaagttggggattggtagtttagtatgagttattggtagagatagtagggaatagattttgatagttgagaggtttgtcgtatatacggtggttgttgttttttttgtgttttattttttagcgtcgaggtattggtatttttttttttaatattagggtaggaattattttttgattttttaattttatagaatgttttgtatttacgtgtagtttaaatataaaaaagggcggtggtaatgaggtgaaaagggaagatttggattttgtataattagttttagttgtatttagttaattaaattttgaggttaattaaagtatttaggatttttgtttgtaattaatagatgtatttgatttgtatttatgttttttggagtatttaagtgagaagagaaggtagaaggagaatgtatgaaattgatataaaggtttatttttattatatttttttttttttttttgagatagggttttgttttgttgtttaggttggagtgtagtggtatgattagggtttattttagttttgattttttgggtttaagtgattgttttatttttgttttcgagtagttgggattataggtgtgtgttattatatttagttaattttttttggttagagtagaagaatttgaaatttagttaattaaaaaaaaaaaaaattttggttgggagtggtggtttatttttgtaattttagtatttttgggaggttgaggcgggaggattgtttgaggttaggagtttaagattaagatttagtttaaatggtaagtttttttgagggttttttcgaatgggttagttttgaggttttgaagtttttttttgttgaattttttgagatggagttttatttattttgttgtttaggttgtagtgtagtggcgtgattttggtttattgtaatttttattttttaggtttaaacgatttttgtgttgtagttttttaagtagttgggattataggcgtttattattacgtttagttaattgtgtatttttagtagagacggggttttattatgttggttaggttggtttttagtttttgattttaagtaatttattcgtttcggttttttaaagtgttacgattataggtatgagttattatatttagttttttgttgaattttgttttttattttttttaatatattaatgttattgtattttgaagaggttattcgtgtgtgtattttgtggttttttttagggtaaattttaatagtttaattttttttaggttatgttgtttagttagttaagtggtaggaagggaaaatgaattttttagggtttagaaaatttttaaattgtttatttataagtatttttttgtttgtttgtttgagatagaggtttgttttgttgtataggttggagtgtaatggtgcgatttcggtttattgtaattttcgttttttggatttaagtaatttttttgttttagtttttcgattagttgggattataggtatttgttattatatttggttaatttttttttgtatttttagtagagacggggttttattatgttaattaggttggtttttaatttttgatatgaggtgatttgttcgttttagttttttaaagtgttgagattataggtgtgagttatcgcgatttatttataatttttttttgattattttttttttgagttgttttggggatttatttattttaggtattgtattttgatggttatatttgttgtaaatatattatttttgtttgtgtgttgttttatatgaaaaattgtaaagttataggtttgtttatagttattagagtttgagttttttgaaagagtaagagatggatattttgatttgtttattttttgagaagtgttttgattgttttattatttagaaaatgtttgttaatattgatgagaagttaataaaataaaaattgttggttgggcgttgtggtttacgtttgtaattttagtagtttgggaggtcgagataggcggattacgaggttaggaaatcgagattattttggttaatacggtgaaatttcgtttttattaaaaatataattagtcgggcgtggcggcgagcgtttgtaattttagttattcgggaggttgaggtaggagaatggcgtgaatttgggaggcggagtttgtagtgagtcgagatcgcgttattgtattttagtttgggcgatagagcgaaattttgttttaaaaaaataaataaataaaaattgttagagcggcgattagtaaatattgataagattaatggtaaggtaagttataaagaaaatgtttgttagagttgaatatgtttattttttttttaattatgttaaatttatgggttaaagaggtaggaatttgttgaggtagttttagagttttttttttttttttttaagttattttaagtaagttaattatttttagcgtattgaaattattattagatatttattttattgagttttagttttaagagtttaaaattttaggattaagtttggaaattttttggtttggtatattgggttttgaaagttatatttcgttgaatttagtttaagaggtatttgttttgttagatgtggttaataataaaagtaggaagagagtttaaggtttaaatgtgtttttttagttattttagttatttttagttatttagatggtgtaaaaaagttgtagatgtcggttgggcgcggtggtttacgtttgtaattttagtattttgggaggttaaggtaggtgggttatgaggttaggatatcgagattattttggttaatatggtgtttttattaaaataaaaaatataaaaaattagtcgggcgtggtggtacgcgtttgtaattttagttattcggaggttgaggaaggagaatcgtttgaattcgggaggtagaagttgttgtaagtcgagatggcgttattgtattttagtttgggtgatagagtaagattttatttttttcgtttttatttttattttgttaaaaaagttgtagatgtttttttttttagttttatttattgtttatggtagggtatgaagtagtagcgtatattattaggagtaattgtgggggtaagcgttttttttttggtaattcgttttatgtttttgtacgttgttgtttgtattttttattgtttgtaagttttattgtcgtttaggttggagtatagtggtgtgattacggtttattgtaatttttatttttttggtttaaatgatttttttattttagttttttaagtagttgggattataggtatatattattacgtttagttaatttttttttttttttttttttggtagaaacggggtttttttatgttagttaggttggttttaaatttttgggtttaagtaagttgtttgtttcggttttttaaagtgttgggattataggtgtgagttattacgtttagttattttttgtgtttttaaattattttagttttattatttaatgattatatatttgggtaatttgttttttttttgtgttttagtttttttatttgtaatatggggttatttatggtattgattttatagggtgtgttttagtttattttgtgttgttatatataatatttgggattaggtagttaataaaaaagagaaattgattttttatagttttggaagttgggaagtcgaagattaaggtgttggtaggtttggttgtttggtgagagttgtatttggaggaatgttgcgtttttatatagacggtgggaggtagaaggtggaagggtaggtgagtttcgtgttgggcgaagttttttttatgagggttttaattttatttatgaggaaggagattttttcgtttaattatttattataggttttatttgttaatttttttatattggtagtatttgaattttggagggggatacgtttaaaatatagtaggttgttttgataaaggaagaaagtgtaggtcgggcgtggttgtttatatttataattttaatattgtaggaggttgaggtaggtaaaattgttttagtttgggtaatacggttttaaatttgattagtttgggtaatatggtaaatttttgtttttataaaaaaaaaaaaaaaattaggtgtggtggtgtatatttgtagtattagttatttaggaggttgaggtgggaggatagtttgagtttgagaggttaaggttgtagtgatttgagattatgttattgtattttagtttgggtaatagatcgagattttgttttagaaagagaaaaagaaaaaaaaggaatgtaaagtatttagggtagtgtttagtattaaggatttattaaatattgtttttgtaaattgaagtatgttgtttttgataattttgttaatataaaagaggtttattttttttttatttgtatttttttgttattttttataaaggaagttgagttgttaatagtttaatgtgattggtttggtacggtggtttatatttgtaattttagttattggggatgttgaggtaggagaatcgtttgaatttgagaggcggaggttgtagtgagtcgagtttatgttattgtattttagtttgggtaatagagtgagattgttaaaaaaaaaaaaaagtttaatgtgattattgtatattttttttttttatattaaggtgttgtaagtttatatataaatatatgttattttttttttttttttttttttgtattttttttttttttttttttttttttttttttttttttttttattttttttattttaaataaaaatgggtttatatttatttgtttttttattagttaataatatagtatggatatttttttgagttattatatatagttaatttattttaatttttttaatttttaaaatttgtttatttgagatagggtttttttttgttatttaggttggagtgtagtgcggcgattacggattattgtagttttaattttttgggtttaagtgatttttttattttttagttttttgagtagttgggattataggtatatattattatgtttagttaatttttgtacgttttgtagagaagggatttcgtttttgttatgttgtttaggttggttttgaatttttgggtttaagtaatgttttcgttttggttttttaaagtgttggaattagaagcgtgagtaatcgtatttggttaatagtttttaaaaatttttttttatgataaggtgttattatgttgtttatgttggtttttattttttggttttaagggattttgtcgttttagttttttaagtagttggattataggttttagttattgtgtttagttagtttaatttatttttttttatatattttttatttttattttaatttatttatttttttgagatagggttttattttgttatttaggttggagtgtagtggtaagattttagtttattgtaatttttgttttttgggtttaagcgatttttttgttttaggttttcgaatagttgggattataggtgttcgttattatatttagttaatttttgtatttttgtagagatagggttttattatgttggttaggatggttttgattttttgatttcgtgatttgttcgttttagttttttaaagtgttgggattataggttcgagttatcgtgtttggttaatttatttttgttaatagtaaaatattttgtagtgtggatgtatttataattttttaaaatgttttttatagataattaggttatatttaatttttgttagtgaaaagtatggtgtaatatatatttttgtttttatagtttgaagtttttagtttgtagaatagatttttttaaattggagagcgagataaaagatttatgtgtttttaaagttttaagagattttgttttattattttttttaaaggttgaggtagtttttatttttattagtaaggtgttaatttttttgttggtataattttaataattttgggtgttatttgttttatattttgtgggtaaatgtaaatttacggtaaatgtaaatatagtatttatgtaaacgaatgggtaaatgttttattttaattttgttttttttgataggttacgtagagtatttttttttttttttttgagacggagttttttattgtcgtttaggttggagtgtaatggtgtaattttggtttattgtaatttttttttttcgagtttaagtgatttttttgttttagttttttaagtagttgggattataggtgtttgttattatatttagttaatttttgtatttttagtagagatagggttttattatgttggttaggttggttttaaatttttgattttaggtgatttgttcgttttggttttttaaagtgttgggattatagttatgagttatagagtttagttgttaatattatttattaaattagttattgatttaaatgttttttttaatttttagtgtttttaaggggaaaatatatttttggttataggagatggaatgtataatttaatgttaaataaagtcgtttttttttttatagattgtaatttttttgtagttgaaggtttgttggttggtaatgggttttttttgtgtgttttgtgtgtgtttttgtagg

SEQ ID NO: 62 - DNA, 12951 bp, Artificial Sequence
  chemically treated genomic DNA (Homo sapiens)
tttatagagatatatataaagtatatagggaaaatttattattaattagtaaatttttagttataggggagttgtagtttgtaaaggagggggcggttttgtttgatattaggttatgtattttattttttgtagttagaaatgtattttttttttaaaagtattgaagattaaaggaagtatttaaattagtggttgatttaataaataatgttgataattgggttttgtggtttataattgtaattttagtattttgggaggttaaggcgggtagattatttgaggttaggagtttgagattagtttggttaatatggtgaaattttgtttttattaaaaatataaaaattagttgggtgtggtggtaggtatttgtaattttagttatttgggaggttgaggtaggagaattatttgaattcgggagggggaggttgtagtgagttaagattgtattattgtattttagtttgggcgataatgggagatttcgttttaaaaaaaaaaaaaaagatgttttgcgtgatttgttaggaaaagtaaaattaaaatgagatatttatttattcgtttatatgggtattgtgtttatatttatcgtgagtttatatttatttataaaatgtaaaataaataatatttagggttattaagattgtattaatagaaaaattggtattttattggtggggataagaattgttttaatttttagggaaagtaatgaggtagaattttttgaaattttaaagatatataaattttttatttcgttttttaatttgggggaatttgttttatagattaaaagttttaggttataagagtaaagatgtgtattatattatgttttttattggtaaaaattagatataatttgattgtttatggggaatattttaagaaattatgggtatatttatattataggatattttgttgttaataagaatgagttggttaggtacggtggttcgagtttgtaattttagtattttgggaggttgaggcgggtaggttacgaggttaagagattaagattattttggttaatatggtgaaattttgtttttataaaaatataaaaattagttgggtgtggtagcgggtatttgtaattttagttattcgggagtttgaggtaggagaatcgtttgaatttaggaagtagaggttgtagtgagttgagattttgttattgtattttagtttgggtgatagagtaagattttgttttagaaaaataaataaattaagataaaagtaaaaaatatataaaaaagaatgagttaaattggttgggtatagtggttggagtttgtaatttagttatttggaaggttgaggcggtaagattttttgaggttaggagatggagattagtatgggtagtatagtgatattttgttataaaaaaaaatttttagagattgttgattaggtacggttgtttacgtttttaattttagtattttgggaggttaaggcgggaatattgtttgagtttaggagtttaagattagtttgggtaatatgataaaagcgaaattttttttttataaaacgtataaaaattagttgggtatggtggtgtatgtttgtagttttaattatttaggaggttgagagatggaaggattatttgaatttaggaggttgaggttgtagtgattcgtgatcgtcgtattgtattttagtttgggtgatagagggagattttgttttaaataaataaattttaaaaattaaaaaaattaaaatgaattaattatatgtagtgatttaaaaagatatttatgttatattattaattgataaaaaagtaagtgaatatgaatttatttttatttaaaatgaaagaagtgagaggaagggagagagggaagggaaggaagaaaaaagaaaatataaaaaaaaaagaaaaaaagaaatgatatatatttgtatgtagatttgtagtattttggtatgagggggaaaaatgtgtagtgattatattaaatttttttttttttttgatagttttattttgttgtttaggttggagtgtagtggtatgaattcggtttattgtaattttcgttttttaggtttaagcgatttttttgttttagtatttttagtagttaggattataggtgtgagttatcgtgttaggttaattatattaaattattaatagtttagttttttttataagaaatggtaaagaggtataggtagaagggaaatgggttttttttatattaataaggttgttagaggtagtatgttttaatttgtaagaatagtatttagtggatttttagtgttaggtattgttttaagtgttttgtattttttttttttttttttttttttttgagatagggtttcgatttgttgtttaggttggaatgtagtggtatgattttaggttattgtagttttgattttttaggtttaagttatttttttattttagttttttgagtagttgatattataggtgtgtattattatatttaattttttttttttttttgtagagatagggatttgttatgttgtttaggttggttaaatttggagtcgtgttgtttaggttggggtaattttgtttgttttagttttttatagtgttgggattataggtgtgagtaattacgttcggtttgtattttttttttttgttaggataatttgttatgttttaaacgtgtttttttttaaaatttaggtgttgttaatgtgagaggattaatagatggggtttgtgataggtgattaggcgagggggtttttttttttatgagtgggattaaggtttttataaaagaggtttcgtttagtacggggtttatttgtttttttattttttattttttatcgtttatgtaaggacgtagtatttttttaaatgtagtttttattagatagttaaatttgttagtattttgattttcgattttttagtttttagaattgtgagaaattaattttttttttttattaattatttagttttaagtattatgtatggtagtataaaatagattgagatatattttatgaggttaatattatgagtagttttatgttatagatgagaaaattgaggtataggagagaagtaagttatttaagtgtgtagttattaagtggtgaagttggaataatttaaaaatatagagagtggttgggcgtggtggtttatatttgtaattttagtattttgggaagtcgaggtaggtagtttgtttgagtttaggagtttgagattagtttggttaatatggagaaatttcgtttttattaaaaaaaaaaaaaaaaaaaaattagttgagcgtagtggtgtgtgtttgtagttttagttatttaggaagttgaggtgggaagattatttgagttagggaggtggaggttgtagtgagtcgtgattatattattgtattttagtttgggcgatagtgagatttataaatagtgagaaatataaataatagcgtataagggtatagagcgaattgttagagaaaggacgtttatttttatagttgtttttgataatgtgcgttgttattttatattttattatgaatagtgggtggagttgggagagaaggtatttgtaatttttttggtagggtgggggtgggggcgggggagatggagttttgttttgttatttaggttggagtgtagtggcgttatttcggtttatagtaatttttgtttttcgggtttaagcgattttttttttttagttttcgaatagttgggattataggcgcgtgttattacgttcggttaattttttgtattttttgttttagtagagatattatgttagttaggatggtttcgatgttttaattttatgatttatttgttttggttttttaaagtgttgggattataggcgtgagttatcgcgtttagtcggtatttgtaatttttttgtattatttgaataattagaaataattaaaataattagaaaggtatatttaaattttaagttttttttttgtttttattattgattatatttagtaaggtaagtgttttttgggttaaatttagcgaagtgtaatttttagggtttaatatgttaaattaggggatttttaaatttggttttagggttttggatttttaaaattaagatttagtggaataggtgtttggtgatgattttaatgcgttggaagtgattgatttgtttgggatagtttggaaaaaggaaaaggaagttttgaggttgttttaataaatttttatttttttaatttatggatttaatatgattgggagggaagtgagtatatttagttttaataggtattttttttgtaatttattttgttattagttttattaatgtttattgatcgtcgttttgatagtttttgtttgtttgtttttttgagatagagtttcgttttgtcgtttaggttggagtgtagtggcgcgatttcggtttattgtaagtttcgttttttaggtttacgttatttttttgttttagtttttcgagtagttgggattataggcgttcgtcgttacgttcggttaattgtatttttagtagagacggggttttatcgtgttagttaggatggtttcgattttttgatttcgtgattcgtttgtttcggttttttaaattgttgggattataggcgtgagttatagcgtttagttaatagtttttattttattgattttttattaatgttaataagtattttttaagtagtaagatagttaaggtattttttagaaaatgagtaaattaggatatttattttttgtttttttaaggagtttagattttaatagttataagtaggtttgtgattttataattttttatgtaaggtaatatataagtaggaataatatatttgtaataaatataattattaaagtgtagtatttggaataggtagatttttaaaataatttaaaagaaaaatgattaaaagaaggttgtgggtgggtcgcggtggtttatatttgtaattttagtattttgggaggttgaggcgggtagattattttatgttaggagttagagattagtttggttaatatggtgaaatttcgtttttattaaaaatataaaaaaaaattaattaggtgtagtggtaggtgtttgtaattttagttaatcgggaggttgaggtaggagaattgtttgaatttaggaggcggaggttgtaatgagtcgagatcgtattattgtattttagtttgtgtaatagagtaagtttttgttttaaataaataaataaaaagatgtttgtgaataggtaatttaaaagttttttgggttttggagggtttattttttttttttgttatttaattagttgagtaatatgatttgggaggagttagattattagagtttattttgagagaggttataagatgtatatacggataatttttttagggtataatggtattagtgtgttaggagaggtaagggataaagtttaatagaaggttgggtgtggtggtttatgtttgtaatcgtagtattttgggagatcgaggcgggtggattatttgaggttaggagttagagattagtttggttaatatggtgaaatttcgtttttattaaaaatatataattagttgggcgtggtggtgggcgtttgtaattttagttatttgggaggttgtagtataagaatcgtttgaatttgggaagtggagattgtaatgagttaagattacgttattgtattatagtttgggtaatagagtgagtgagattttattttaaaaagtttaatagaggaaaattttaggattttagggttggtttattcggaaaggtttttagaggagtttgttatttgagttgaattttggttttgaatttttggttttaagtagttttttcgttttagttttttaaaagtgttgggattataggaatgagttattatttttagttaaaattttttttttttttaattagttgggttttaagtttttttgttttgattaaaaaaaattagttgggtgtggtggtatatatttgtagttttagttattcgggggtaaagatgggataattatttgagtttaggaggttaaggttgaagtgagttttgattatgttattgtattttagtttgggtaataaagtaagattttgttttaaaaagaaaaaaagaagtatgataaagataagtttttgtattagttttatgtattttttttttgttttttttttttatttgagtgttttagggaatatgagtgtaaattagatgtatttattagttgtaaataaaaattttggatgttttagttaattttaagatttggttagttgggtatagttaaaattaattatataagatttaagttttttttttttattttattattatcgtttttttttgtgtttaagttatacgtaaatatagaatattttgtaagattgaaaagttaggaaatagtttttgttttagtattggaggagagggtgttagtgtttcgacgttgaagaatgaaatataagggaaatagtaattatcgtgtatgcggtaagttttttagttgttagaatttattttttgttgtttttgttagtaatttatgttgggttattaatttttagtttagttttttttttagagattttgataattttagtttgttaattgtaagggtagtttgtttttttatttattttgattaagatgggtttttttgtgtataggcgtatttttagaggtaggattaggtttatagggaaggaaattataaaacgtaggattttgttttagatgaggtaatagttttttaaattttagtattgtttaattttagagtgagattatttgggaaatagtttttaatttttgtagttgttttagttggttatttatgttttgggtggagttggggtgatttttgagtttttttagggtcgatggtcgagtgggaaggttttattattgaagtggatttaatattagaaacggatttagtacgatttgattaggtttgtttaatttaagggttttaatggaaaatgttttttaaggttaggtacggtggtttacgttagtaattttagtatttggggaggttgaggtgggtggattatttgaggttaggagtttaagatcgcgttggttaatttggcgaaattcgtttttattaaaaatataaaaattagtcgcgtatgatggcgtatttttgtaattttagttattcgggaggttgagatgggagaatcgtttgaattcgggaggcggaagtttcgttgagttgagatagcgttattgtattatagtttgggcgataagagtaaaatttcgttttaaataaaataaaataaaataaaataaaatttgtgtttggtagtttggagtcggttttggttttcgttaaattaaaggtattagttttttttatttttgtttattaatcgttagatatttttattttttttagaagttcggaatttatatttttaagtgaaattatttattttaatgttagtaatttattttaaagtgttttagatattatagattaaaagaggtatgggttgtgatcgtaagtttgatttggtttttgacggttagtttttgattatagttttggagggaatttttgtttttaaggttaagttttttttaaatgtttattagagttcgtggggtggagtgaggaaggattcgcgatatcggatataaatagaagttttttttttttcggagttcgattaaggtttattttaggtttttaattttttttttttgtgggttttgagttaaggaataaaatttagggttaagtttttataattttttttataggtattagtgttcgagagacgatcgttaagtatttcgttttttgtagtatttatcgattatggttttggtgtagttcggggcgttgattggttgggttcgtggttgtcggggcgattttggtcggaattaggttttcggtgagttgggcggtttcggttgtaattttgtgggagtcgcgtgtgtagtgtacggtgtatttttttttatatattttgttcggttcgtttgaggtggatagtttataagggcgggatttaacgtttgaattttggggtgttgggcggaggatgttgaggttgtagttttaggaagggagggagtttgggggatgaaggaggggtttttttatttttattcgtcggagtaattggtggaagttaagaaaagtttttcggggttgggggaggggattgtaggggtgtgtgtgatagaggttttaaaaatttggttgggggtgttaaggtaagtttatttgcgtattgtgttttgaggtgtaagaggatgtagggtggaagtcgttttaagagagtttagggattaagtgggtatgtttttttagttttggtacgaaatggagtagaaaaagagtcggatgcggattattgtggtgttttaggtttagattttgttgagttattgtgattgcggatttggaaggttgagagttttggggagatatgtttcgtggagacgaatttgtttttttttttgtaagatttagattttgtatttgggggtttatataatatatttttttgggtgtatgttattgtattatttttgttttttaaggtaggtaatgggggaattaattggttttgttttttatgagttaaggtaaggttggtgtggagatagtagttatagggaagtatattaaagaatagttaaaacgggattaggcgcggtggtttacgtttgtaattttagtaatatgggaggtcgaggtgggtggattatttgaggttaggagttcgagattagtttggttaatttggtgaagtttcgtttgtattgaaaaattagttgggcgtgatggcgggcgtttgtaagttttagttattcgggaggttgaggtaggagaatcgtttgaattcggaaggcggaggttgtagtgggtcgagatcgtgttattgtattttcgtttgggtgacgaagtgagatttcgttttaaaaaaaattttataaagtaaaagttattgtaaagaaggagatatatttttagtaggtgaaggaaaaagaattagagttttaaagtggtaattaattattagaagaattatagatgggggaggtgaggatgatatagggttttttcgttgtttttttagtgtaaaagttaaggaggtattagaaaattggtttttaattttcgattttaggtgattttatcgtttcggtttttcgaagtgttgggattataggtatgagttatcgcgttcggttttatcgtgatatttttgtatttattttgatgtaataagagaggattatattatttatacgtatttataaattattttgggaggttgaggtaggaggattatttgagtttaagagtttgagaaaagtttgagtaataaagtgagattttatttgataaaatagtataaaaggacgttttaaaaaagggttaggtaggtagttttgtttaatagaattttttttatttgtgttgtttaagtaaggtagttataagttttaagtagttattgagtattggaaatgtggttagtagttaggcgtggtggtaggcgtttgtgttttagttatttaggatttgaggtaaaaagatcgtttgagtttaggaatttaaggtcgtagtggtggatttaataaaagaaaaaaaatggaaattaaaaaaaaaaaagtggttagtggattgaggaagtgaagttttaattgtaattaaattaattttttaaaaatttattttttgaggcggggttttattgtgtcgtttaggttggagtgtagtggtaggattttggtttattgtaatttttattttttgggtttaagtaatttttgtgttttagttttttgagtagttaggattacgggtatgtattattatagttagttattttttgtattattcgtagagatgagttttattatgttagttaggttggttttaaatttttgattttaggtgatttgtttatttcggttttttaaagtgttaggattataggtatgtgttattgcgtttggttttaattaaatttagatagttatatgttattagtgtttggaaagatttgagttggtttagatcgaggtcgtagtgtgttggttattttattttttatttttttagtgagattgtttttttaattattagtttttttgatttatttagaggtggggtttaaagttataaagtttaagtgtcgtgttcggtcgttggtttttagtatggttagtttttatttttagttattttgttaatatgaattatataggggtttattttaagttattttattagtataaattattaggagtggtttgagaagtttataatgaataagatggatatttttattatttgggatttaggggtttaggggtatgatgatagtttattgtagtttcgattttttttttttttattgagtttattattgcggttttgaatttttgggtttaagcgatttttttgttttagattttgagtagttgggatataggcgtttgttattacgtttggttgttggttatatttttagtgtttaatagttatttgaagtttgtggttattttatttgggtagtatagatagggaaagttttattggatagggttgtttatttagtttttttttaaaacgtttttttatattattttgttagatggggttttattttgttgtttaggttttttttaaatttttgggtttaagtaatttttttgttttagttttttgagtagttgagatgataggtgtatgttatcgtgtttggttaatttttttttatttttttggtagagatagggttttattatgttgtttaagttggttttaaatttttgggtttatgtgattttttcgttttgattttttaaagtgttggagttataggtatgtgttattatttttggttaaatttgttattatatagtggtaaagatagatatttgaggtggtagtgaattaagattatgttattgtattttagtttgggtaatagagggagattttgttttaaaagaaaaaaagaaatttattggtcgggtatagtggtttaggtttgtaattttagtattttgggagattgaagcgggtggattatttgagtttaggaattggagattagtttggttaatgtggtgaaatttcgtttttattaaaaatataaaaatatgagttgggtgtggtggtgggcgtttttagttttagttattcgggaggttgaggtacgagaatcgtttgaatttaggaggtagaggttgtagtgagttgagattgtgttattgtattttagtttgggtaataagagcgagattttattttaagaaaaaaagaaaaagaaaaagttgttgtggagtatgggcgagtattgttgtttggataaagatcgagggttttcgggagggtagtattgatgtataggtttttagtaggtcggcgtgtgtgtttttttttgtaggtttgtagttaggcgtgttaggagagggggagtttgagggattgatgtaggttgggaaagtatgatgagaggagatagagtgggggttgtgaagaagagagcgatttgatggtggcggtagttatataggtgtatgtatttattaaaattcgttgaaaagtatattttaaatataagtattttattgtatgtatgttattttttaataaagtttatttttaaaaagtagagtggttggagtgatgacgaatattatgaaagggtttattggtagagaaaaagtagaggggtttagagatttaagtttttaaggaggttgaagtaagagtgggggattaaataagggtaaaaattgagagaataaaaaaagtgggttgtttggggttaggtgcggtggtttatatttgtaattttagtattttgggaggttaaggtagggggatcgtttgagtttaggagtttaagattagtttgggtaatatagtgagattttttttaattttttttatttttgttatttttaaaaaaattaaaaattagttaggtgtggtggtgtgtatttgtggatttagttatttaggaggttgagatgggtggattatttgagtttgggaagtcgacgttatagtgagttgtgattgtattattgtattttaatttaggtagtatagtgatattttatttaaaaataaaaagaaaaaataaaaatttaagtgggttgattgggaaatataggagatagaagttaaaattatggggaaatattagttaaattatagtgtgggatattttataggataattaatttggtttattttataatttagtgttataagaaaaatgaaggagtgtatattgattaggattttttagagaaatagaattaattgaatttttataaatatataaaaagtaatatattgttgggtgtagggtttatattttgtgatggttaataatgagtgttaatttgattggattgaaggatgtaaagtattgattttgggtgtgtttgtgagggcgttattaaaggaggtgaatatttgagttagtgggattgggaagggcggatttatttttaatttgggtgggtattaattaattagttgttagtgcggttagaatataaagtaggtagaaaaacgtgaaaagattagattaggtttggtgtcgtggtttacgtttgtaattttagtattttgggaggtcgagacgggtggattatttgaagttaggagtttaagattagtttggttaatatggtaaaatttatttttgttaaaaatataaaaaaatttagttgggtgttgtggtgtatgtttataatgttagttatttaggaggttgaggtaggagaatagtttgaatttaggaagtagaggttgcggtgagtcgagattatatcgttgtattttaatttgggtgatagagatttattttattaaaaaaaaaaa

SEQ ID NO: 63 - DNA, 8451 bp, Artificial Sequence
  chemically treated genomic DNA (Homo sapiens)
gacggagttttattatgttggttaggttggttttgaatttttgattttaggtgatttgtttattttggtttttaaagtgttgggattataagtatgagttattacgtttgtttttaagtatatttttttagtttattttttttagtatgtaatttatagaagggtaatttgaattgtaaatacgatttttaagttaaaatttttgggttagttcgtgatgaagtagtaatttataaaagagatagtatagtaataaatgagataattatattcggaaatgtggaattattaatttttatgcgaaaatagtttatgagatttttgtgtttttttatttatgttatgcgtttttttatttttattttattttattttatatgtttttttttttgtttggattatttttattttattattattttttttttggtaaatttttatttatatttaaaaattttgtttaatgattttttttttgtgaaaattttgtggtaaaatttaattatttttgtttgtgtatattttttttttatttgtgtgtatatagtatgtgtttataattggaagggtgtttatttgttattcgtttgtttgttttgttaaagtgtgagtttttatagttatagggttgtgtgttagttttggtgtttgtatagtatttagttagtagttatatttagtgttgttgaattaatttttggtttaaaaatatgtttatatttgtttttttaaggcgttaatttaaattttttatttattttaaaaaataaataattttttggtattttaaaaattatatttaaataatagaaaaagagtttatttgaattttaagtattaattttaaaatgaattgtatgttttaaaatttgatttagtgatattatttaagagaatttttaaaaagtaaatttttatttttattttagtgtaataaatattaagttttattaaattattaaattgatttatttttttttttttttttgagatggagttttgttttgttgtttaggttggagtttagtggggtaatttcggtttattgtaattttcgtttatttaggtttaagcgatttttttgttttagtttttcgagtagttgggattataagtgtatattattatatttagttaatttttgtgtttttagtagagacggggttttattatgttggttaggttggttacgaatttttgatttaaagtgatttgttcgttttggttttttaaagtgttgggattataggtgtgagttattatatttagtttgttttttattttttggtttttttttttttttttttttttttttgagataggtttttttttttaggttggagtgtagtgattatagtttattgtagttttaattattggggtttaagtaatttttttattttagtttttcgagtagttgggattttaggtatgtattattatgtttggttaatttttttttattatttgtggagatggggttttgttatgttgtttaggttggttttaaatttttgggtttaagtaatttatttgcgttggttttttaaagtgttgggattataggtgatttattttttaattgtgttaaagaataaagtatttattttatttgtttttttgtatttaaaatggttttttatattttagatttagaaagataaatataagtaaattaataagtattttatttgtattatttgttgttttttaatagtttatatttagtttatttttgaagggtaaagattattgattgtttatttaatttttttattttgaatttagtgagatttttttttattttttataaatgtatgtttaaaatttgattttagtgtagaattggaattaaaatgtatgtaattttattttttatagtaggagttaaatgtttattaagtttttttttgagtttagtattttgtagttaaatgattattattttttagttacgtttttaaaaaaaattatgttggtttgtaataaaaattgtattttttttattaggtaagtgaattattttgttgggaagagtattttggtttcgagaaaaaaatgattttattttgaaaggttttttttttaatttttttttgtataaatttttagtttagtaatttgttagtattttggaaaagtgtattataaaataaaaattcgaattagataaaatatatttttggaatttttgaggtagattaatgaagttttgattttaggtgttagtaaaataaagtaggtatttttattttgtattgttttattttttagttttttatggtgttttttaaattttgatgttttgaagaagttttaatgtttgttatattagtaggagttgattatagggaagagataaatatagttttttttggaaaggtgaaggtttagttattagaattttgttttttgatgttgagaatgtatttttttcgaatagatggaaaagaggggtggagattattttagggatatattttgtaaaatgttgatattcgaagatgtatatagttttgtgttttggttatttttttaaattatgtttttggtgaaggtatatggagaggagagtagatgttgttagattacggtgtttgacgttatgtatttttttacgtttagtttgtttatgtgtatacggttgtagcgggattttggggtgtgggttaaataataagaataggggtttttttggggtttgttataaggtagagatgttttacggtaattagggatttaggggaagaggaaggaatatatatgttgataataagtagtttaatattattatttttattttatagatgtagttattgagtttagagaggttttataatttgtttagagttttttaattagtaaatagtggagtcgagatttgaacgatttaaagaggaaagtaaataagtagtttttttattatttttttttttttttaagatgagggttttgttatgttgtttaggttgatattgaatttttggttataagtgatttattattttggttttacgaagtattgggattatagttatgagttattatattgggttaaagttttcgtattgtaatttttaagatgtttttatttttaaagttaaaggttgttagagttgttgttttgtagggagttatgggatggggagttttcgggaaatttaggttggttttttaaatggtattatttaagttggttattaagtttttttagatttagttattcggttttttttttttttggttgtagagtaggggtttggattcgaggttgttgagtttttttttagtttttatgtttagtggtagtgatttattaattggtttattcggtggatgtaggggtgatgtagttttgttttgtttttttgagtgttgggtggttatgagagagggaggttatgagagggaggggagggtttttatttgtttagtgttattttttttttagtttattttaggttttttgtcgttttgggtttttgcgtgagtagttttttttattttgggcgatgttcgtttttattagtttaattttaagaagtttattttggggaggatagagggagtttttacggttttatatttttatgttttgtcggagatttggttaggtagagtggtgtttttttgattgagtttcgagtttttgttttttttttattttatataaagtcgtagttttggcgagggagtttagaggtttgaggatagtttgttgggtgtttggtattttttagattttttttgtttgggcggtgggtatttgtaattttttttgtttcgaattgtagtagaatgtgtgggtagggttaggtagatagagagtgggtgtttggatttattggttagattttaagatcgtttattttcgtcgttttcgtagttttttttaggattggttgatttattagataggggagggtgttgttttttattattatattttttgagaaaagttatgtaggtttgggagacgtttgtgttttaggagttttttttggtttgaagatttaaggttgtaaataggtgttgagagggaataagaaggggagttggggtgtaatatatttagtgatagattaggagtgagtgttgtggttatagattttaatttttataattgtagtgtgatttaggttaagttttttgtttatttcgatttttgttttaaataagtgaaaaggaaagttaagtttgatgagttgtggttttttagtgggtggatttgtatgtattatggattatatttattagggtttaggaattgttaagcgtttagtaggttgttattaggttttcgagttttttcgttaggcggttttatttggagtaagaggaaagtaaaggtttgaggtttagttaagagggcgttattttgtttggttagtttttcgataaagtagacgggggggtgtggagtcgtggtgatttttttcgttttttttagggtgggttttttgggtttgggttggtggaagtgaatattgtttgtagtaagaagaaggattgtttatgtgggagcgtaaggcggtagcggggttggaaatttatttttatatagttaatatttgttgttatattaggttaattaagaatatttttttttggtgtattaattatttgttattaaataaagggttgttattaggtggtaaagtaatatattgtagtagagtttatttgtaatttgagattagtggttgtaaggtattatttttgagttaagtaagtattaatatttttgttattttaattagaatgtaagagatcgtgtttttaaaattttttttgaatttgttattttgtttttttttttttgggtgatatatttggtagtgttggtgggggttattataatgttttttgttttagattttttttttttagatgggattcgagtattgattattttagttttgtattttttaggttagcgtggtttagtttgttgtgtagagtttaggggagataattacgttgtgtatatatgagattggttgatttggtaggattgtgtaattgttagaaggtcgtggggagtgggggttagtgtttgtagtttgttttgttttttttataggtttttagagtatcgttaggtgtagagttttatagtttttttttttaaggagtaattagagggtgagaacgtggagtttggtggataggtgaaagtattgggatttttttgtttagaaaggggaaagttgtatatttatattttagagggaagcgatagtagtgtttttttttgtgttgaggtataggtaaggagggtggtttgtaaagtttattggggagggtgatttttttttattgttttaatattatgttcgtagtttttttgataatattatgtaaaatgtgttttattagtttttagtgtataaaatattggtggagtttttcgttgtgttgggttagttattagtgttgggtattgtgggttaaggtagtgtttaggacgggtatagttttgtttttttaagttatggtttattgtggtaggatttgtttgtttagtgaagtgtgtttagttgtttttgttgttgggggaagttttgttttttgttttcggttgttttttatacgtttttatgtgttttttagtttttaatttttagttttgtttttaatatcgtaggggtttttagttgatttttttttatttttttaaagggtaggattttttggtagagatataacgtttttttggaaatgaaagaagttgatgtatgtttttttttttttgaattatttaaataagaggaatttatttttaggtattttttgttttgtttttattgtgggagtgtggttttagttgtttatttgattagttgatatagggtttttggggtttaggtattgttattgtttgggattgaaagatgaaagttatagggttaggtatagtagttcgtgtttttaattttattattttggaaagtcgaggtgggcggatcgttggaggttaggagtttgagattagtttggttaatatggtgaaacgttgtttttattaaaaatataaaaattagtaggaggtggtggtatgtatttgtaattatagttatttaggagtttgaggtacgagaattttttgaatttagggatagaagttgtagtgagtcgagatcgtattattgtattttttgagattttgttttaaaaaaaaaaaaaaaaaaaaaagggaaagtaatggtttggtttggttggagatggaatatgtattaacgtgttttacgtgtttttagtagggatagcgaaggtttgttttttggtatatggtagattgagtaaatgttgattagtgagattttgaggtattttagagttttataatttagagagggagatagattggaagtttaagggtggatatttgggtatgatttttaggacgaaggttgtagtcggttttaagaagtatgttggtgattatgagagaagaggttgtgggtttttttttttgaaagttgtttttataattatatgtggggtgataagggttttggtttaggggagggggcgaggtatatagggggttgaatttgatggtatgaggatttggtgatgggttgtggggaaagaattggagatgattttagggtttgagggtgggaagttgggagtttattgggattattgatagaaacgcggaggtggggggtgttaagttgatttttttgattagattttttatagaattgtaggaataaggcgagagttatcgttttgggtggatttttgtttggagttttatcgttggattattgtggataagtattttatagaacgatttttagtagtttaattttaggtttagaggggtagtttttgataggagtaaattttagggtttttgtaattttttagtagagttttaaatatttgatatgtagttaatggaggatatgtaagtggtggggtttttagtagggattattttttgttttgggtttttaagatagagcgaggggcgttgttggggcgtggtttgtaggggttttgttagaattcgatgttttttttttcgtttgggttttaattgtagtgtatttagagatttttttttgatttaggtataaggacggttcgtatatttatgtaggttattttgaataagaatagtttatgggttatttttttaggaatgaggaagatgaagagttagataataatgttgggttggtatttgtttgatagtgttttgttaagattatggttttttttttttttgattaaaaaagatataggagttagataaatggggattaaaagataattgagttgatgtgaaatgtaataggtaatattatggatatagaaagtagattagaggttgtttaggatttaacgtggagggtagtaggggagcgatagttgaagggtatggagttttttcgtgtcgatgaaaatgttttatagttgattgtggttatggttgtatatgtttgtgaatattttagaaattattggagggtttattttaaatgggcgaattgtatggtatatgaattatgttttaataaagtttttatatagttaagttgtgtggttatggttgggttttttagtagtgttttttaattttaaattgaatttatttttttagtatttgggtttttttattatttcgtttgttttgaggataagtttttttttaagaaggatagagtaggggttgtgggttattatttaggaaaggtgttttttttttttgggggagggaatttagaggttatggatagaagtttttttagatatgtaaaaaatatgaggttgtcgggcgtcgtggtttatatttgtaattttagtattttgggaggtcgaggcgggcggattacgaggttaagagattgagattattttggttaatatggtgaaattttatttttattaaaaatataaaaattagttgggtgtggtggtacgtgtttgtagttttagttattcgggaggttgaggtaggagaatggtgggaatttgggaggtaaaggttgtaatgagttgagattgtgttattgtattttagtttggtgatatagtgaaattttattttaaaaaaaaaaataatatgaggttttagaaatgtagtttttaaaattttttatttagggttgtgtagaagttaaattaggtttttatttttttaggatgatgaatagtttttaaagtttagtaggattgtgggtgattttgttttattgtttgttgtttttttatttttttagattatatatatataatatttatattatatataatatgtatatagtgtgtgtatatatatatataatatgtatatattaggttaagtgtaaataaaattagggatagggttggagcgtagtaggaaagagtttgttggggattagagtttttgggttgttagggtcgggttgggcgggtttcgttgttaatggtttttttttattttgtagg

SEQ ID NO: 64 - DNA, 8451 bp, Artificial Sequence
  chemically treated genomic DNA (Homo sapiens)
tttgtaagatgaggggaagttattaataacggagttcgtttagttcggttttgatagtttagagattttgatttttagtaggtttttttttgttgcgttttaattttgtttttgattttatttatatttgatttaatatatatatattatatatatatatatatatattatatatatattatatatagtataaatattatatatatatgatttagaaaaatggaaaaataatagataatgagataaaattatttataattttattaagttttgaaaattgtttattattttgggaaaataggaatttggtttggtttttgtatagttttgggtagggggttttgggagttatatttttgaggttttatgttgtttttttttttgagatggagttttattgtgttattaggttggagtgtagtggtataattttagtttattgtaatttttgttttttaggtttttattatttttttgttttagtttttcgagtagttgggattataggtacgtgttattatatttagttaatttttgtatttttagtagagatggggttttattatgttagttaggatggttttaattttttgatttcgtgattcgttcgtttcggttttttaaagtgttgggattataggtgtgagttacggcgttcgatagttttatgttttttgtatgtttgagaaggtttttgtttatgatttttgggtttttttttttaggggagaggagtattttttttgaatggtggtttatagtttttgttttgttttttttggagagaggtttatttttagggtagacggggtaatggggaggtttaagtgttgggagagtaagtttaatttggggttgggggatattgttaggaagtttagttatggttatatagtttagttgtgtaagagttttattgaaatataatttatatattatataattcgtttatttaaagtgaattttttagtggtttttaggatatttatagatatgtgtagttatagttatagttaattgtagaatatttttatcggtacggagaaattttatattttttagttgtcgtttttttattgttttttacgttaggttttaagtagtttttaatttattttttgtgtttatagtgttgtttgttatattttatattaatttagttgttttttaatttttatttgtttgatttttgtgttttttttgattagaagaggaagaaattatagttttggtaaagtattattaggtagatattagtttagtattgttatttagttttttattttttttatttttagggaagtaatttatagattgtttttgtttagagtaatttgtatgaatatgcgggtcgtttttatgtttgagttagaggagggtttttagatgtattgtagttaggatttagacggaggagaaagtatcgagttttgataaggtttttgtaaattacgttttagtagcgtttttcgttttgttttggaaatttaaggtaggaggtggtttttgttgggaattttattatttgtatgttttttattggttatatgttagatgtttgggattttgttggggggttgtagaggttttggagtttgtttttgttaagagttgtttttttaaatttagaattgggttattgggggtcgttttatgaaatatttgtttatagtggtttagcgatagagttttaaatagaaatttatttagggcgatggttttcgttttatttttgtagttttgtaggaaatttaattaggaaaattagtttggtattttttattttcgcgtttttattagtgattttagtgaatttttagttttttatttttaggttttagagttatttttaattttttttttatagtttattattaagtttttatgttattagatttagttttttgtgtgtttcgtttttttttttggattagagtttttattattttatatgtgattatggagatagtttttaagagaggaaatttataatttttttttttatagttattagtatattttttagaatcgattgtagttttcgttttgggaattatgtttaggtgtttatttttgaatttttaatttatttttttttttggattgtgaaattttaaagtgttttaaggttttattgattaatatttatttagtttattatgtgttagggggtaggttttcgttatttttgttggagatacgtgggatacgttgatgtatgttttatttttagttaagttaggttattgtttttttttttttttttttttttttttttgagatagagttttaaagagtgtagtggtgcgatttcggtttattgtaatttttgtttttgggtttaagagattttcgtgttttagatttttgagtagttgtgattataggtgtatattattattttttgttaatttttgtatttttagtaaagatagcgttttattatgttggttaggttggttttaaatttttgatttttagcgattcgtttatttcggttttttaaagtgatgagattagaggtacgagttgttgtgtttggttttgtggtttttattttttaattttaagtagtaatagtgtttgggttttaaggattttatgttagttgattagatgggtagttgggattatatttttataataaaaataaggtagggaatatttggaaatgagttttttttatttaagtaatttagaaaagaaaaaatatgtattagttttttttatttttagaaagacgttatgtttttgttaggaaattttgttttttaagaagatggagaaaagttagttaaaagtttttgcggtattgaaagtaggattaggggttagggattgggagatatatgggagcgtgtgggaggtagtcgaaggtagagagtagagttttttttagtaataggagtagttgaatatattttattgggtaggtagattttattataataaattatagtttgggaaggtagggttgtgttcgttttgggtattgttttgatttatagtgtttagtattggtgattggtttagtatagcgaagagttttattaatattttatgtattagaagttagtaagatatattttgtatgatgttgttaaggaggttgcgagtataatattagaataataaagagggattattttttttagtgaattttataaattattttttttatttgtattttagtatagggagaagtattgttgtcgtttttttttaggatataaatgtgtaatttttttttttttgggtagaaagattttagtgtttttatttgtttattaggttttacgtttttattttttgattattttttgggaaagagagttgtggagttttgtatttggcgatgttttaagggtttgtgagagaggtagggtaggttgtaggtattggtttttattttttacggttttttgataattgtatagttttgttaagttagttaattttatgtgtgtatagcgtggttattttttttggattttgtatagtaaattgaattacgttgatttgagagatatagggttgaaatgattagtgttcgagttttatttaaaagaagggaatttgggataaggggtattatgatggtttttattagtattattaggtgtattatttaggaagaggagggtaaagtgatagatttaaagagaattttaaaaatacgattttttgtattttaattaagataataagaatattagtatttgtttggtttaaggatggtgttttatagttattgattttagattataaataggttttattgtagtgtgttattttgttatttagtaatagttttttatttaatagtaggtggttaatgtattaaagaaaagtgtttttgattagtttggtgtgatagtaggtgttgattgtgtgggggtgggtttttaatttcgttgtcgttttgcgtttttatatgaatagtttttttttttgttgtaggtaatatttatttttattagtttaagtttaaggagtttattttggggaggacggagggggttattacggttttatattttttcgtttgttttgtcggagagttggttaggtagagtggcgtttttttgattgagttttaaatttttgttttttttttattttaaataaagtcgtttggcgaaggagttcggaggtttgatggtagtttgttgggcgtttgataatttttagattttggtaaatgtaatttatggtatatgtaaatttatttattaaagagttataatttattaaatttgatttttttttttatttatttaaggtaagaatcggagtaggtaaggggtttagtttaaattatattgtagttgtgaggattagaatttgtggttatagtatttatttttggtttgttattgggtgtgttgtattttaatttttttttttgtttttttttagtatttgtttgtagttttgagtttttaggttagaagggatttttagggtatagacgttttttaggtttgtatagttttttttaaaaaatgtaataataagaaataatatttttttttatttggtgggttagttagttttgggaaggattgcgggggcggcgggggtgggcggttttagagtttgattaatgagtttaggtatttattttttatttgtttaattttgtttatatattttgttgtagttcgagatagggagaattgtagatgtttatcgtttaggtagggaggatttagagagtgttaggtatttagtaggttgtttttaggtttttgggttttttcgttagggttgcggttttatgtggagtaaggggaaagtaaaggttcgaggtttagttaagagggtattattttgtttggttagattttcgataaagtatgggggtgtggagtcgtggagattttttttgttttttttagggtggattttttggggttgggttggtgaaagcgaatatcgtttagagtgagaaggattgtttacgtaggaatttaaggcggtagaggatttggggtgggttggggagggggtggtattaagtagatgagaattttttttttttttttatggttttttttttttatggttatttagtatttaagaggatagagtagggttgtattatttttatatttatcgggtgggttagttgataagttattgttattgggtatggaagttggagaggaatttagtagtttcgagtttaaatttttgttttatagttagggaaagagggggtcgagtgattgagtttggggaagtttgatggttaatttgggtgatgttatttaaggagttagtttgggtttttcggagattttttattttatggttttttgtaaaatagtaattttgataatttttgattttagaaatgaaaatattttggaggttataatacgagggttttggtttagtgtggtagtttatgattgtaattttagtatttcgtggggttaaggtggtgaattatttgtggttaggaatttaatattagtttgggtaatatagtaagatttttattttaaaaaaaaaaaaaagtaataaaggggttgtttgtttgtttttttttttgggtcgtttaaatttcggttttattgtttattagttgaggggttttgggtaagttatgaaatttttttaagtttagtagttgtatttgtaaaatggggataataatgttgaattatttattattaatatgtgtgtttttttttttttttttaaatttttaattatcgtggagtatttttgttttgtaatagattttagaggagtttttgtttttgttatttagtttatattttaaggtttcgttgtagtcgtgtgtatataaataggttggacgtgagggagtgtatggcgttaggtatcgtggtttggtagtatttgtttttttttttatgtgtttttattaaggatatgatttgggaggatgattaaagtataaggttatgtatattttcgggtattagtattttgtaagatatgtttttggggtaatttttattttttttttttatttgttcggagaaggtgtatttttagtattaaggggtagaattttggtggttaagtttttatttttttaaggagagttatatttattttttttttgtggttagtttttgttgatgtagtaaatattagaatttttttaaaatattaaagtttaggagatattatgaaaaattgagaagtaaaataatataaaatgagagtgtttgttttattttgttagtatttgaaattagagttttattgatttgttttaaaagttttagagatatattttatttgattcgagtttttgttttgtaatgtatttttttagaatattgataagttattgggttgagagtttgtgtaggagggggttggaggggaagttttttagaatgaaattatttttttttcgaagttaaggtattttttttaataaaatggtttatttgtttagtaaagaaaatataatttttgttgtaaattagtatgattttttttaaaaacgtgattggaagatagtggttatttagttataagatattgagtttagaggggaatttgatgaatatttggtttttattgtaagaaatgggattgtatatattttaattttaattttatattgaagttaaattttgggtatgtatttgtgaaaggtggaagaaaattttattaagtttaaggtgaagaagttagatgagtaattaatggtttttattttttaaagatggattaaatgtaaattgttagaaaataataaatgatataagtagagtatttgttagtttatttgtgtttatttttttggatttgaggtataaaggattattttaaatataggagagtaaataaagtaggtgttttgttttttggtatagttaaaaggtaaattatttgtaattttagtattttgggaggttaacgtaggtagattatttgagtttaggagtttgagattagtttgggtaatatggtaaaattttatttttataaataataaaaaaaaattagttaggtatggtggtgtatgtttgaggttttagttattcgggaggttgaagtgggaagattgtttgagttttagtggttgaggttgtagtgagttatgattattgtattttagtttgagaggaagaatttgttttaaaaaaaaaaaaaaaaaaaaaaaagaattaaaaaatgaaaaataggttgggtatggtggtttatatttgtaattttagtattttgggaggttaaggcgagtagattattttaggttaggagttcgtgattagtttggttaatatggtgaaatttcgtttttattaaaaatataaaaattagttgggtgtggtagtgtgtatttgtagttttagttattcgggaggttgaggtagaagaatcgtttgaatttgggtaggcggaggttgtagtgagtcgagattgttttattagattttagtttgggtaatagagtaagattttattttaaaaaaaaaagaaaaggtagattagtttaataatttaatggaatttaatatttgttatattggggtaaaaataaaagtttgttttttaaaaatttttttaagtgatgttattaagttaagttttaaaatatataatttattttaagattgatatttaaagtttaaatgaattttttttttgttatttgaatgtggtttttaaagtgttaagaagttatttgttttttaaagtaaataagagatttggattggcgttttggaaaagtaagtataaatatgtttttggattagaggttggtttagtaatattgagtgtaattattggttgggtattgtgtaggtattaggattaatatataattttgtaattgtaggagtttatattttagtagggtagataaacggataatagataaatatttttttagttatagatatatattatatgtatatagatggaagagaagtgtgtataagtagaagtggttaggttttgttataaagtttttatagagaaggggttattgagtagggtttttaagtatgaataggagtttattaggagaaaaataatggtggaatgggaataatttaggtagaaagaagagtatgtggaatggaatgggatggaagtgaggaagcgtatggtatgaatgaaaaaatataagagttttataggttattttcgtataagagttgatgattttatattttcgagtgtagttgttttatttattattatattattttttttataaattgttattttattacgagttgatttaggagttttaatttagaaatcgtgtttataatttagattatttttttgtaaattatatgttgaaaagagtgagttaagaaaatatatttggggataggcgtggtggtttatgtttgtaattttagtattttggaggttaaggtgggtagattatttgaggttaggagtttaagattagtttggttaatatggtgaaatttcgtt

SEQ ID NO: 65 - DNA, 12870 bp, Artificial Sequence
  chemically treated genomic DNA (Homo sapiens)
ggagtgtagtggtgtgatgtcggtttattgtaatttttgtttttcgggtttaagcgatttttttgttttagttttttgagtagttgggattataggtattcgttattacgtttagttaatttttgtatttttagtagagatagggttttattatattggttaggatggtttcgattttttgattttgtaattcgttcgttttggttttttaaagtgttgggattataggcgtgagttattgcgttcggttttaattttgtttttgttttttattttaaattgtttttagagtaaatggtatacgtttaatttttaagtgaattggggtattatttggtataattttttagaaatttttttggaaaaatattgataattttttttagttggtttttttaaagaatatgaatttttggggtatagatttatttatataattatgtggttttttgaaaaggatttgtaaaaaataatattaattatgaatataggattaattttatgttttttttgtatttttcgttgggaatagtttgtatgattttttatagtttgagttggtatggggatttgggaaatgttttgtagttttttagggttagttatttttttaagtttatggatttatttgggaagagtttttgtttgtgtgttataaataatatttatattggaagttgtttttttgatttttgagttatatagtaatgttgttttattgattaaagttatataaaatgttatattttgttaggtaatgaggtttagggatgggttggatgatggattttatatgtgaggttgtgttgttgtttgttattttagaaagttttaagattgtcgttgttgaggtagttgttataattttttgaagtaatgagtagagtttttattaggttgttaattttgtttatgaggtttaaagttttgaattatgataatgtcggtggtaagatgcgtttttaaataatgtgatcggtttgttttattaatttttttagttttcggtggaataggaatgaggaaagtttttgtttgggttgatgtttgagttatgttggagatagtaggtttgtgtttagggttttttattttgtatgttttaagatttaatgaagatttttttgagtgaattttaagatataagtagattgatttttttttttttttttttagatagagtttttttttgttatttaggttggagtgtaatggcgcgatttcggtttattataatttttgttttttgggtttaagcgatttttttgttttagttttttaagtagttgggattataggtatgtattattacgtttggttaattttgtatttttagtagagacgaggtttttttatgttggttaggttggtttcgaatttttaattttagatgatttgttggttttagttttttatagtgttggaattataggcgtgagttattgcgtttggacgtaaagtttttaaatatttttttaaaatatttattgtaatgagaaagattgggtggagtatttgttattttagtattttgggagtttaaggtggatagattattcgagtttaggagttcgagattagtttggttaatatggcgagattttatttttattaaaaatttgaaaattagtcggtgtggtagtacgtatttgtagttttagttattcgggagattgagatgggattattttttgagttcgaaaggtagaggttgaagtgagttgtgatggcgttattgtattttagtttgggtgatagattaagattttgttttaaaaaattaagaagaaagtttgtttaggattttaggtagtagttgaatttatttgtattataggagtaaatggatttatattgttcgttgtagtaattttttttttgtttttttttttttttttttttttttttttttgagatagagttttattttgttgtttaggttggagtgtagtggtatgatttcggtttattgtaagtttcgtttttcgggtttacgttatttttttgttttagtttttcgggtagttgggattataggcgttcgttattaaatttggttaattttttgtatttttagtagagacggggttttattgtgttagttaggatggtattgattttttgattttatgatttattttggttttttaaagtgttgggattataggcgtgagttaaggtgtttagtttgttttttttttttttttttttttttttttttttgttttttttttttttagtagtcgtattttatttagaagatgggtttaagtaatagtaaataggtagtagataggttaattttagtaataatatattttatatagttacggagtatttaaatagattttttatagtttagaattataagtattataaagaaattttgttagaattttaaggaataatgagtatatattaatattaatttgtagtttttttttttaggaatttcgttatatataggagtttttttttttggttaaataggtttgtttatcgttttttaaatatagtttatagttttttgttatttgaaatgtttgtttttttattttttttatgatttacgtttaattttgtttttttgttaaatttattttttttttttgcgtttgaatttttggtattttatatttgtatatggtatttaggagaaatttttttgtagttatttaggtgagtgtttttatttgttttgttagtttagaattttttggagttagggattatttttaatttagattattagtgggattttgtagagtttattagttgtgatatagtggttaagtgaataagttttggaattagattgtttgggtttaaatttagttttgttatttattagtagtcggttaattttaattatgttttttaatttttgtgtgttttaatttttttgtaatatgagaatattaatagtgtttattttgtagggttattttgaagattaaataaagtaatataaaataatttgaatattgtttttaatgtattaagtatacgggaaacggtagttttttttatttattataatttgtatttttagcgggaagaatggtgtttagtttgttttttatttattatgatgtttagtttagttttgttttttattaagtttattaggtataattaaaggattttttatttggttttaaatgttttttatattttaagttttttaattgattgatagttttttttatagttttttaatatagttttgtttttttattggtttttagatatgttttgttcgtttttattttgtgtttttatttatattgttttttttttttggaatgttaattcggtttttttttttttagtttttatttgttttttatttttttatttaaattttattttttttaggaagttttttttgattattttagtttatttttattatttttttttttggatttttttaggaattaaagttagtgaatacgtattgatattttttataataatttattgggttttggtttttttttttttagaagttcggtagggtatgatagtttatatttgtaattttagtgttttgggaggttgaggcgggtagattatttgaggttaggagttcgagattagtttggttaacgtggtgaaattttatttttattaaaaatataaaaattagttaggcgtttgtaattttagttattcgtgaggttgaggtagaagaatcgtttgaattcgggaggcggaggttgtagtgagttaagattgcgttattgtattttagtttgggtgatagagtgagattgagttttaaaaaaaagaagttgataaattttttatgaatagttgggatgtttttattttttttgttatttgtatttagtacgtagttttatgttgggtttttagtaggtgtttaatatttatggattgatgtatttatatgtttaggtttggttaagggaagttgaggttttggttttttttttagtagtgagtttaagttggagtgaagaatagaaggtagggggttagtttttttgttaattttttttgtttttttattgttatttaggttatagaatatagtagggtttttaggtaagtcgttagtggtgtagattttgaaattagattgattttttagttaatggttgatagtttttgtttattttaatgattgttaagatttattattgaatatgatatattttgtagtttaattgttttggttttgagggtagaaagtaatttttgaggttttagggttttgggataggattagaaatatttgggtttatttttagttatttaggatgtggataataagtaagtggtcggagggtattttggtattgttatatgggtgggaagtattgttagtttttattttgattttaggtgttagtaggtattatttatggtttttttttttttattgttatttaatgtgtttatttatttatattttttgtagagatggggttttattatgttgtttaggttggttttaaatttttggttttaagtgattttttcgttttggttaaagtgttgggattataggtatgagttattatgttcggttttgttatatagttttagaggttgggagttagaagggttgattaggatggtagtttgtataggatttttttttgtagtttgttcgtattgtggatttgtttaaggttagggtatgggggaagtttgagggatgttgaggagtataggtttagtttagttttttagagagattaaatatgggtgggtgataatgatgtttttttttttttgggataaggtagtgattttaggttatgtgatttgtttttttaaatttatagggagtttagaggattaattttgtttaatgattgtatgtgggaggaggtggggttggttaatgtttgtttggttttttttgggttgtgggttatttttggttttggttttgggttcgttgttttttttttgggttgggttgatagtatttggtggtatagggtagatacgtttgtagatattttttgggaaagggtagtagtagttaggtgtggtagtgatagggaggtgaggagattgggggttgagggaggtgggttagggagggttgatgtggtatagtgggtcggaaataggggtcgggttttgttttttattgattttcgtttttagttatttaggttttttttatgtttttttttgaagttggggtgaggttttttttgttaggtgttagatttgtttagtttttttttgtagtttttttttaggtttaatattgtttttttttttatttttttttttttggttaaagattttttttatttttatagggttagatttttaggaagatttgagggattttttaggtgtaaggtggttaagtttgtttttttgagatattttttgttatatagggttagggtttagtgggaatgttgggtattgttaggtgttgttttttttttttgattataaggtaagttaggtatgtatttaatacggggttgcgagtggatgaataaagcgtgtttagcgggttgtagagggttagttaatagggttaaggatttgggagcgtgtgtttttatttttttgaaggaggtagattgatttaagttgaatttggagtaattgatggttcggagattttttttttttttttgagacggatttttatttttgttgttttggttggggtgtaatggcgtaatttcggtttattgtaatttttgtttttcgggtttaagcgatttttttgttttagtttttcgagtagttgggattataggtatgtattattatgtttggttaattttgtatttttagtagagacggggtttttttatgttggttaggttggttttaaatttttaattttaggtgatttgttcgtttcggttttttaaagtgttgggattataggtatgagttattacgttcggtcggtttggagatttaaaggaggggtgttttttagttgtttgaaagttgttgtagttgttgggaatggtatagtagaatgtgtaaatttagaaaatgaaatgaggagaggagaatatagataagaggggttttaatggagagaagtatagattagaatgtagtttggtaatggaaaagggatttaggtttgggtgaggggttaatacgatttttattttgagttttagtatttgtttattatttgtgtagtaagttatttagtttttgttagtttttattgttttatttgtgagttgaagataatagtttttggtttacggggttgttgtgagcgtgagagtttgtgaatatatatatagggggtattttataaatggtagttgttataataatttaagtagagagtaataggaagttaggtgggtgatggaggagtaagggagtagcgtttaaataatggggaagggagttggtataagtagaagttttttgaaaagatcgtagtagagagggggaaagaataaatcggaatgagttagattggatttgatttaagtttggttacggaatatgtatggtagggtggagaggttaagtttagtgattgagatattgtagaattgtagggtggaggtaagagagagaagtaggggaaggggaagagagttggaggagtttggttttagttatattaaattgatgaaggtagttagaaatttttaaggaaattttaaagaaagttttatgtttttttttgattagtgattgtttgcgaaatgggggagggagtatggagttcgaggttgaatgtaattttatttattttagtttattttttttttttaaattttaaattataaggatttttttgtagttggaaggatagggaggaggtgggggtagaaatagagagagatagagatagattagacgaatgtgtgtgtgtgtgtgtgtgtgtgtgtgtgtgtgtgcgtgtgttagtatacgtaggaaagtgtataggtttttgaatagtaggtttggttttagaatgtaaattttttaaaggaagagaggtcgttataagtagcgttatatataaagattttgaggtaagaaaataaatttggaatttgattttattatttagtagtagtgtaattgtcgttgaggtaagttttttaatttttttgagttttaatttttttgtttgaaaaatggggataatattataggattgttgtaaggattaagtgagattatttgattttgtattgtgtttgagtgttagggtaaatttaaatttggggatagggttagagtttgataaggttagagaagttttgtttaattaaatatgagagtaaaatacgcgtgtagtaatatcgaggatattaatacggggattttaattcgaagttataaaaatagtttggattttaaaattaggttatttttttggatgtttttagaatgaaatttttgaggtattgatattgatatagggattagttttttttttaaaggtaatagtaaaaattgagattatagtatttagataagggtttttagaggttttatagggagttattggttatgttttagaagatttaagaagaaaaaaggcggggagttataagaatttagaaatttaggggtggttaggatgtttgtggtatatttttgaagggtagagaagagaatagttaaggtttgttttgtagtttgaggaagtagtttaagaaaggtaaggaaaggaaaagtagattaaattaagaggtagtagaaaattttgggatagaaggagagggaaagagttgttaattgttataataaaagtattttagaaaaaaaagagttgggttaggtatagtggtttacgtttgtaattttagtattttgggaggttgaggtagtaggattatttgaggttaggatttcgagattagtttggttaatatggtaaaatattatttttattaaaaatgtaaaaattagttaggtgtggtgatacgtatttgtaattttagttattcgggaggttgaggtaggagaattatttgaatttaggaggcggaggttgtagtgagtagagagcgtgttattgtattttagtttgggtgatagagtaagattttattttaaaaaaaaagaaaagaaagagttgttaattgataggaaaggggagaaggggttaaaagaaaataagatatagtagttttgaatttttttgtttttttttttttttttttttaatttttttgtttttaaaaagtatttatagaaagaaaagttatatttgtagttaagtagagtttatgggaaagagtatgtgttttgcgagaattatttgaattcgggaggcggaggttgtagtgagtcgagatcgcgttattgtattttagtttgggttatagagtgagattttgttttaaaagaaaaaaaaagtgtgtggttaggtacggtggtttacgtttgtaattttagtattttcggaggtcgaggcgggcggattacgaggttaggagattaagattattttggttaatacggtgaaattttatttttattaaaaatataaaaaaattagtcgggcgtggttgcgggggcgtttgtagttttagttatttaagagtttgaggtagaagaatggcgtgaatttagggggcggagtttgtagtgagtcgagatcgcgttattgtattttagtttgggtgattgagttagatttcgttttaaaaaaaaaaaaaaagtgtgtgttttggagttagtttgatttggtttaaattttagttttattatttattgattatgtgatttttagataagtttttttatttttttttgtttttgtttgtttatttgtgatatgaggataaagtaatatttattttaaaaagtttttttaaggattaaatgatagtgtatgtgtaggggtttggtatataataggtatttagtaaatttttttttaataaaaatgttataatgttgaggtggttttattattattattattattattattattattattattttttgagataggttggagtgtagttggcgtaattgaagtttattgtagtttcgattttttggatttaagagatttgtttgttatagttttttaagtagttaggattatgggtgaatggtattagttattatgtttggataatttttgtgtttttttttttgtagagatggggttttattatgttgtttatggttggttttgaatttttagatttaagcgatatttttatttttgtttttttttaattttttttttaagagacggggggttttatatgttgtttaagaataatttggttaggggttaggcgcggtggtttacgtttataattttagtatttagggaggttgaggtaggtggattacgaggttaggagatcgagattattttggttaacgtggtgaaatttcgtttttattaaaaatataaaaaaaaattagttaggcgtggtggcgggcgtttgtagttttagttattcgggaggttgaggtaggagaatggcgtgaatttgggaggcggagtttgtagtgagttgagatcgcgttattgtagtttagtttgggttttttttttttttttaaatataatagagacgagggttatgttatgttgtttatgatggttttaaatttttgggtttaagtaatttatttattttagttttttaaagtgttgggattcgaggcggagttattgcgtttggtttaggttttgtttgtttgtttgtttgtttgtttgtttgtttgttcgtttttttcgagacggagttttatttttttttttaggttggagtgtagtgacgggatttttatttattgtaatttttgttttttgggttttaataatttttttgttttagttttttgagtagttgggattacgggtgttcgttattatatttagttaatttttgtatttttagtatagacggggttttattatgttggttaggttggatttgaattttttagtgatttgttcgtttaagttttttaaagtgttgggattgtaggcgtgagtttttgtatttagtcggttatttttaataattttttggttatttgttttagagtgtaatatattttattatttgaagtattttttttttttttttgttttttttttttttttttttttttttttttttgtgagatagagtttcgttttgttattaggttggagtgtagtggcgtaatttcggtttattgtaattttcgttttttgggtttaagtaatttttttgttttagttttttaagtagttgggattataggtgtatgttattatatttagttaatttttgtaattttagtagagacgaggttttattatgttggtttcgatttgttgatttcgtgattcgttcgttttggttttttaaagtgttgggattataggcgtgagttattttgtttagtttttgaagtatttttttatggttaattgtggtgtttagtgtagtagttttgtatatagaattttaggtttgggagaaagggtatttatagttttgtttttttatgttggttggtatatgatatgaatttattaaggttttttatttatttatttatttatttatttatttatttatttatttagttaaatgaagaaattttgttttgagaagtaatttatgttttgtggattgtttttttttttttagatttttttattttattttttaatttttgtagttgttgttattttattttttttttttatagtatagaggattatttagggttgaatatgaggttttttttataattagttgttttgttgtggagtatgtattggggttaggaaatgattttagggattattgtattttttatggtttagggttgtatgttttttttatatttagttttttgttgttagtatgatttttttgtaatttaatggtagaagtggtaagaggtgggagaagtttttttagtttgtttaagggatagaggagaattttttttttagagtaattggtaagtttttgaaattacgaggttgtaatatgtatttggggttgggggttgggtagtaatggggttttagatagattttataggttaataatagtattggggattgtttaaggtggtttatatttgtaaatttaatattttgggaggtaaaagtgggaagatcgtttgagtttaggagtttaagattagtttgggtaatatagtaagttttttatttttataaaaaaaaaaaattgaaaaattagttgggtatggtgatatatatttgtggttttagttaattgagaggttgaggtgggaggatcgttggagtttaggaggttaaggttgtagtgagtagtgattgtgttattgtattttagttttagtgatatagttagattttgtttttattttttaataaaaaataatttatagtattagggagaaaaaggagagattttgggtttgatagattatttatttttttaaagtaattttgttatttttttttgagaagatttttttttttttttgagacggagttttgttttgtcgttcggattggagtgtagtggtgtaattttggtttattgtaatttttgttttttgggttttagtgatttttttatttagtagttgggattataggtatgcgttattatatacggttaattttttgtatttttagtagagatggggttttatattgttagttaggatggttttgattttttgattttaagtgatttgtttattttagttttttaaagtgttgggattataggcgtgagtaacggcgtttagtttttttttttttttttttttaatggttagtttttgttttttatagatattatttgtagaagtatagggagtttgttgtagaaagatttttgttttagatatattgttttattttatttattttatcgttttggaacggtgtgattttgaggagttatttatttgagttttagtttttttatttggaaaatgggataataggttttttaaatgggtcgaaagaaaaaatgtatggaataacgtttagtatagtttgtggttttataaatgagtttttttttttgtttttttttttttttatatttcggagaggatttaagttttagggaaaattttggtgattttaagtttttgacggggttatgggggagggttttagtttagagtttttgggttttttggggttttttttttatatttatttgtttgtgttttattttttttttttcgttttttcgtggttatttttttggtggggttatggggcgggtgcggcgatggatcgggcgggtatagaataggtgggtgtaggttgggtgttcggcgttgggatataagtgttttgtgtgtagggtgggcggaagttagggcgtttgatttgaattttaaagggcgttgtttagagttttataaaggttttattgtgtagatattgggtataaagtagtatatgattttttagtatcgggcggtgatgaattgggacgtaggcgcggagtttagggattattttttttgtatagatatgagattataggggatttgtttgggtggttttagggataggcgttttttaaggtaagagggttttgttgagtttgttttaggtttggagttaaggagttaggggatagggagttataggggatggttgatatcggaataagatgggtttggtaaagaaaggggttggcgggaaaagaatgttggatgaaagcgaagaagggggatggggtttagggaggttaagttaagtgagtgaggaggaggagaagttggtaagggagatggggtgacgaggaaagatatgattatttttttttttttgttattggtttttggaagagttgagggggggtgcgtaggtagtgttatggcgttcgattttttattttagttttttgatagtttgttttatggttggtgttttgtagg

SEQ ID NO: 66 - DNA, 12870 bp, Artificial Sequence
  chemically treated genomic DNA (Homo sapiens)
tttgtaaaatattagttatgaagtaagttgttagaaagttggggtggaaagtcgggcgttatagtattgtttgcgtatttttttttaatttttttaagagttagtagtaggaaaggaaggatggttatgttttttttcgttattttattttttttgttagtttttttttttttttatttatttgatttgatttttttgagttttatttttttttttcgtttttatttaatatttttttttcgttagtttttttttttgttaagtttattttgtttcgatattagttattttttatggttttttgttttttagttttttaattttagatttggggtaaatttaataaagtttttttattttggggagcgtttatttttgaggttatttagataggttttttatggttttatgtttgtgtagggggagtggtttttgggtttcgcgtttgcgttttaatttattatcgttcggtgttggggagttatatgttgttttatatttagtgtttgtataatgagatttttgtggggttttgaataacgttttttagaatttagattaaacgttttgattttcgtttattttatatatagagtatttgtgttttagcgtcggatatttagtttgtatttatttgttttgtgttcgttcggtttatcgtcgtattcgttttatagttttattagaagaatggttacgggggggcggggggagggagataaaatataggtaggtggatgtgaagaggggattttaggggatttagaggttttgggttgaggtttttttttatggtttcgttagaagtttaaggttattaggattttttttgaggtttagatttttttcggaatatggagaggaaagaggataggaaagagagtttatttatgaagttataaattgtgttgagcgttgttttatatattttttttttcgatttatttaggaagtttgttattttattttttagatgaagaagttgaagtttagataagtaattttttaaggttatatcgttttaaagcggtaggataggtaggatgaaataatgtatttgagatagaagtttttttatagtaggttttttgtgtttttgtagatagtgtttgtagaaagtaaaggttaattattaaaaaaaaaaaaaaaaaaaggttgggcgtcgttgtttacgtttgtaattttagtattttaggaggttgaagtgggtagattatttgaggttaggagattaagattattttggttaataatgtgaaattttatttttattaaaaatataaaaaattagtcgtgtgtggtggcgtatgtttgtaattttagttgttgggtgggagaattattggaatttaggaggtagaggttgtagtgggttaagattgtattattgtattttagttcgggcgatagagtaagatttcgttttaaaaaaaaaaaaaaatttttttaggaaaagataataaagttgttttgggggaataaatggtttgttaaatttaagattttttttttttttttttaatgttgtgggttgttttttattagagggtggggataaggtttggttatattattaaggttagagtgtagtggtataattattgtttattgtagttttgattttttgggttttagcgatttttttattttagttttttaattagttgggattataggtatgtgttattatgtttagttaattttttaattttttttttttgtagagatggggggtttgttatgttgtttaggttggttttgaatttttgggtttaagcgatttttttatttttgttttttaaagtgttgggtttataggtgtgagttattttgagtagtttttaatgttgttgttgatttatagggtttgtttgagattttattgttgtttagtttttaattttaagtgtatattgtaatttcgtggttttaggagtttgttagttgttttagggaggaaatttttttttattttttaggtaggttaagaaggttttttttattttttgttatttttgttattaagttgtaaggagattatattagtagtaggaaattgaatgtgaggaggatatgtagttttggattataggaggtgtagtgatttttggagttattttttgattttagtgtatgttttatagtagagtaattggttgtggaagaagttttatatttagttttgggtggttttttatgttgtagaggaaaggggtggggtaatagtaattgtaaaagttgggaaatgggatgaaagaatttggggaaagaaggatagtttataggatataggttattttttagaataaggtttttttatttagttaaataaataaataaataaataaataaataaataaataaataaaaagttttagtgagtttatgttatgtgttaattagtatggggaagtagggttatgggtgtttttttttttaagtttgggattttatatgtaaagttgttgtattaggtattatagttagttataaagaaatgttttaggggttgggtaaggtggtttacgtttgtaattttaatattttgggaggttaaggcgggcggattacgaggttagtagatcgaggttaatatggtgaaatttcgtttttattaaaattataaaaattagttgggtgtagtggtatgtatttgtaattttagttatttgggaggttgaggtaggagaattgtttgaatttaggaggcggagattgtagtgagtcgagattgcgttattgtattttagtttggtgatagagcgagattttgttttataaaaaaaaaaaaaaaaaaaaaaaggaaagaaataaagaaagaaaagaaatgttttaggtggtgagatgtgttatattttagaataggtggttagagaattattaagaataatcggttgggtgtaggggtttacgtttgtaattttagtattttgggaggtttaggcgggtagattattgaggggtttaagtttagtttgattaatatggtgaaatttcgtttgtattaaaaatataaaaattagttgggtgtggtggcgggtattcgtaattttagttatttaggaggttgaggtaggagaattgttagaatttaggaggtagaggttgtagtgagtggagatttcgttattgtattttagtttgggggaaagagtgagatttcgtttcggaaaagacgaataaataaataaataaataaataaataaataaataaaatttaggttaggcgtagtggtttcgtttcgaattttagtattttgggaggttgaggtgggtggattgtttgagtttaggagtttgagattattatgggtaatatagtatgattttcgtttttattatatttaaaaaaaaaaaaaaagtttaggttggattgtagtggcgcgattttagtttattgtaagtttcgttttttaggtttacgttatttttttgttttagtttttcgagtagttgggattataggcgttcgttattacgtttggttaatttttttttgtatttttagtagagacggggttttattacgttagttaggatggtttcgattttttgatttcgtgatttatttgttttagtttttttaagtgttgggattataggcgtgagttatcgcgtttggtttttggttaggttatttttaggtaatatatggagtttttcgttttttaaaaaaaaaattaaaaggaggtagaggtaggagtatcgtttgagtttaggagtttaagattagttataggtaatatagtgagattttatttttataaaaaaagaaatataaaaattatttaggtatggtggttggtgttatttatttatagttttagttatttaagaggttgtggtaggtagattttttgagtttaagaggtcgaggttgtagtgagttttaattgcgttaattgtattttagtttgttttagaaaataataataataataataataataataataataataagattattttaatattgtagtatttttattaaaaaaaaatttattgagtatttgttatatgttaggtttttgtatatgtattgttatttaatttttaaaagaattttttgaggtaagtgttgttttatttttatattatagatgagtaaatagaggtaaagaaaggtgaaaggatttatttaagagttatatagttagtaagtgatagagttgggatttgaattaggttaagttgattttagaatatatattttttttttttttttgagacggagtttagtttagttatttaggttggagtgtagtggcgcgatttcggtttattgtaagtttcgttttttgggtttacgttatttttttgttttagatttttgagtagttgggattataggcgttttcgtaattacgttcggttaatttttttgtatttttagtagagatggggttttatcgtgttagttaggatggttttgattttttgatttcgtgattcgttcgtttcggttttcgaaagtgttggaattataggcgtgagttatcgtgtttggttatatatttttttttttttttgagatagggttttattttgtagtttaggttgaagtgtagtggcgcgatttcggtttattgtaattttcgtttttcgggtttaagtgattttcgtagagtatatatttttttttataagttttatttggttataggtataatttttttttttgtgggtattttttaggaatagggagattgaaaaaaaaaaaaaaaaggaatagggagatttaaaattgttatgttttatttttttttagttttttttttttttttttattaattgataatttttttttttttttttttttgagatggagttttgttttgttatttaggttggagtatagtggtacgttttttgtttattgtaattttcgttttttgggtttaaatgatttttttgttttagtttttcgagtagttgggattataggtgcgtgttattatatttggttaatttttgtatttttagtagagatggtgttttattatgttggttaggttggtttcgaagttttgattttaggtaattttgttgttttagttttttaaagtgttgggattataggcgtgagttattgtgtttggtttagtttttttttttttaaggtatttttgttgtagtaattgataattttttttttttttttttgttttaggattttttgttgttttttgatttggtttgttttttttttttttattttttttgggttgtttttttaaattgtaaagtaaattttagttgtttttttttttgttttttaggggtgtgttatagatattttggttatttttgagtttttaggtttttgtaatttttcgttttttttttttttgagttttttgggatatagttagtagttttttgtggggtttttaaggatttttgtttgggtgttgtgattttaatttttgttgttatttttggaaggagaattgatttttatgttaatattaatgttttaaggattttattttaaaaatatttaggggagtgatttgattttgaaatttaaattgtttttgtgatttcgggttaaagttttcgtattgatattttcggtgttgttgtacgcgtgttttgtttttatgtttaattagataggatttttttggttttgttaggttttggttttgtttttagatttagatttgttttagtatttaagtatagtgtaaaattaggtgattttatttagtttttatagtagttttgtaatattatttttattttttagataaggaagttgaggtttagagaggttaagaaatttgttttaacggtaattgtattgttgttaaatggtagaattaagttttaagtttatttttttattttaaagtttttgtatatggcgttgtttatggcggtttttttttttttaaggagtttgtattttgagattaggtttattatttaaaaatttatatatttttttgcgtgtgttggtatacgtatatatatatatatatatatatatatatatatatattcgtttagtttgtttttgtttttttttgtttttgtttttattttttttttatttttttaattataggaaaatttttgtgatttggggtttggggaagaggggtgggttgggatggatgaggttatatttagtttcggattttatgtttttttttttatttcgtaggtagttattggttaggaagggatatggggttttttttgagatttttttaggaatttttggttgtttttattagtttggtgtggttaaggttaaatttttttagttttttttttttttttttgttttttttttttgtttttattttgtagttttgtaatattttagttattggatttagtttttttattttgttatatatatttcgtggttaggtttgggttaggtttagtttagtttatttcgatttgttttttttttttttttgttgcggtttttttagagagtttttgtttatgttagtttttttttttattgtttggacgttatttttttatttttttattatttatttgattttttgttgttttttgtttgggttattataatagttgttatttatggagtgttttttgtgtgtatatttatagatttttacgtttataataatttcgtgagttaggagttattgtttttaatttataggtgaggtaatgaaggttaatagaagttgagtaatttattatataggtggtaagtaagtgttggagtttagagtaggaatcgtattggttttttatttaagtttgggttttttttttattgttaggttgtattttaatttatatttttttttattaaaattttttttgtttgtatttttttttttttattttattttttaagtttatatattttgttgtgttatttttaatagttgtaataatttttaaatagttggggaatattttttttttagatttttaaatcggtcgggcgtggtggtttatgtttgtaattttagtattttgggaggtcgaagcgggtagattatttgaggttgggagtttgagattagtttgattaatatggagaaatttcgtttttattaaaaatataaaattagttaggtatggtggtgtatgtttgtaattttagttattcgggaggttgaggtaggagaatcgtttgaattcgggaggtagaggttgtagtgagtcgagattgcgttattgtattttagttagggtaataagagtgaaagttcgttttaaaaaaaaaaaaaaaattttcgaattattaattattttaagtttagtttgagttagtttgttttttttaagaaagtggaaatatacgtttttaaatttttggttttgttggttagttttttgtagttcgttgagtacgttttatttatttattcgtagtttcgtgttgggtgtatgtttggtttgttttgtaattaaggaaggaaaatagtatttggtagtgtttaatatttttattaaattttaattttgtgtggtaggaaatgttttagagagataaatttggttattttgtatttagggggttttttaagtttttttgagaatttggttttatgggaataaggggaatttttggttagaggaaaaaaagtgagaggaaaagtaatgttgaatttggaaagaggttgtagagagaggttaagtaagtttggtatttggtaggaggggttttattttagttttagagggaagtatggaagggatttaagtggttgaaggcggaggttagtagaaggtaagattcggtttttattttcggtttattgtgttatattagttttttttggtttattttttttagtttttagtttttttatttttttgttattgttatatttggttgttgttgtttttttttagagaatgtttgtaggcgtgtttgttttatgttattaggtattgttagtttagtttaggggagggataacgaatttagggttagagttagaaatggtttatagtttaagaggaattagataaatattaattagttttatttttttttatatataattattaaataagattgattttttgagttttttatgggtttggagagatagattatatagtttggagttattgttttgttttagaggaagagaggtattattgttatttatttatgtttagtttttttgggagattgagttggatttgtgttttttagtattttttaggttttttttatgttttggttttaggtagatttatagtgcgggtaagttgtagagagggattttgtataggttgttattttggttaatttttttagtttttagtttttaaaattgtatgatagggtcgggtatggtggtttatgtttgtaattttagtattttggttaaggcgggaggattatttgaagttaggagtttgagattagtttgggtaatatagtaagattttatttttataaaaagtataaataaataaatatattagatgataatggggaggaaaaagttatgggtgatgtttgttggtatttgaggttaaggtgggagttggtagtgttttttatttatatggtagtattagggtgtttttcggttatttgtttattgtttatattttgagtggttggggatggatttaagtatttttaattttattttagaattttaaaattttagaaattgttttttatttttaaggttaaggtagttgaattgtaaagtgtattatgtttagtaatgaattttggtaattattaaggtaaatagagattgttaattattaattgagggattagtttagttttaaggtttgtattattgacggtttatttgaagattttgttgtgttttgtggtttgaatggtagtggagaaataagggaagttagtagagaaattggttttttgttttttgttttttattttagtttgagtttattgttagaaagggagttagggttttagttttttttagttaaatttgggtatatggatatattaatttatgagtattggatatttattaggaatttagtatagggttacgtgttgggtgtaggtggtaaaggaggtgaaaatattttaattgtttataagagatttattaattttttttttttgagatttagttttattttgttatttaggttagagtgtagtggcgtaattttggtttattgtaattttcgtttttcgggtttaagcgatttttttgttttagttttacgagtagttgggattataggcgtttagttaatttttgtatttttagtagagatggggttttattacgttggttaggttggtttcgaatttttgattttaagtgatttgttcgttttagttttttaaagtattgggattataggtgtgagttattatgttttgtcgaatttttggaggagaggggattaagatttaataaattgttgtgaaaaatattagtgcgtatttattaattttgatttttgagagagtttagagaagggaatgatgagaataaattgaagtaattagggaaggttttttagaggaagtgaggtttgagtggagaagtaaaagataggtaggagttggaaggggaaggatcgggttagtattttagggaggaggaatagtgtgagtgaaggtatagagtaggaacgagtaaggtatatttgggagttagtaaggaggtaggattgtgttgaggggttgtggaggaaattgttagttagttaagaggtttagagtatggaggatatttaaagttagatagggaattttttagttgtgtttggtaaatttggtaaaaggtaaaattgagttggatattatggtgggtgggggataggttgaatattatttttttcgttgagagtataagttgtaatggatagagaggattatcgtttttcgtgtatttaatgtattaaaggtaatgtttaaattgttttgtattattttgtttgatttttaaaataattttataaagtaggtattattaatatttttatgttataggggaattaaggtatatagaggttaagagatataattgaggttagtcggttattggtaaataataaagttggatttgaatttaggtagtttggttttagaatttgtttatttggttattatattatagttgatgaattttataaggttttattgataatttgagttagaggtggtttttgattttagaagattttaagttaataggatagatagagatatttatttgagtaattataagggagttttttttaaatgttatatgtagatatgagatgttagaagtttagacgtagaagaaaagggtaggtttaatagaaaggtagagttggacgtgggttataaaggagatggagggataaatattttaggtgataggaagttgtgagttgtgtttggggaacggtaggtagatttgtttgattagaagagagagtttttatatatagcggagtttttaggaagggaaattataggttaatattagtgtgtatttattgttttttggagttttggtaggatttttttgtggtgtttatagttttaaattataggaagtttatttggatatttcgtagttgtataaaatatattgttgttagaattgatttgtttgttgtttatttattgttatttgagtttattttttggatggagtgcggttgttagagagaagaaaggtaaggaaagagaagggagggaaaagagggagagtaggttgggtattttggtttacgtttgtaattttagtattttgggaggttaaggtggattatgaggttaggagattaatattattttggttaatatagtgaaatttcgtttttattaaaaatataaaaaattagttaggtttggtggcgggcgtttgtagttttagttattcgggaggttgaagtaggagaatggcgtgaattcgggaggcggagtttgtagtgagtcgagattatgttattgtattttagtttgggtaatagagtgagattttgttttaaaaaaaaaaaaaaaaaaaagagagggaggataaagggaaaattattatagcgaataatgtaaatttatttgtttttgtgatgtaggtgaatttagttgttatttggaattttaagtaaattttttttttgattttttgagatagggttttggtttgttatttaggttggagtgtagtggcgttattatagtttattttagtttttatttttcgggtttaagggatggttttattttagtttttcgagtagttgggattataggtgcgtgttgttatatcggttaatttttaaatttttggtagagatggggtttcgttatgttgattaggttgatttcgaatttttgaattcgagtgatttatttattttggatttttaaagtgttgagataataggtgttttatttagttttttttattataatgaatgttttgggggaatatttaaaaattttacgtttaggcgtagtggtttacgtttgtaattttagtattgtgggaggttgaagttagtagattatttgaggttgggagttcgagattagtttgattaatatggagaaatttcgtttttattaaaaatataaaattagttaggcgtggtggtatatgtttgtaattttagttatttgggaggttgaggtaggagaatcgtttgaatttaggaggtagaggttgtgatgagtcgagatcgcgttattgtattttagtttgggtgatagagagagattttgtttaaaaaaaaaaaaaaaaaaattagtttgtttatgttttgagatttatttaaggaaatttttattaaattttgagatatataaggtaagagattttaaatataagtttgttgtttttagtatggtttaaatattagtttaaataagggttttttttatttttgttttatcgaagattaagagagttgatggagtaaatcgattatattatttaaaagcgtattttattatcgatattgttatagtttagagttttaggttttataaatagaattggtagtttggtgagagttttgtttattattttagggagttgtggtagttgttttagtaacggtaattttgaggttttttgggatggtaggtagtagtatagttttatatgtggagtttattatttagtttatttttgggttttattatttaataaaatgtggtattttgtatggttttgattaatgagatagtattgttgtatgatttagaaattaaagggatagtttttaatataaatattgtttatgatatataggtaaaaattttttttaaatgggtttataggtttaaggagatggttaattttgagaagttgtagaatattttttaaatttttatgttagtttaggttgtggaagattatgtaaattgtttttagcgagaggtgtaagggaaatatggaattggttttgtatttataattggtattattttttataaattttttttaaaaggttatatgattatatgaatggatttatgttttaggaatttatattttttgaagaagttaattagagggagttattagtatttttttaaggaggtttttgaagaattgtattagatagtgttttaatttatttgagagttagacgtatgttatttgttttaaggatagtttggagtggagaataaaagtaaagttgaaatcgggcgtagtggtttacgtttgtaattttagtattttgggaggttaagacgggcggattataaagttaagagatcgagattattttggttaatatggtgaaattttgtttttattaaagatataaaaattagttgggcgtggtggcgggtgtttgtagttttagttatttaggaggttgaggtaggagaatcgtttgaattcgggaggtagaggttgtagtgagtcgatattatattattgtatttt

SEQ ID NO: 67 - DNA, 11052 bp, Artificial Sequence
  chemically treated genomic DNA (Homo sapiens)
tattgtagatgatagaaaattaatataaaggaataatgatatgtgatgagttagggcgtagtatgatatgtgagttttatggagaggtatttattttatgggggaaagaggtgtgtgttttggggtattttttagaggtgttaatatattattttgatttgagtttttttgggttagtaggagttagttatatagaaataagaggaagggtattttgggtatagggagtagtaggtttaaagtgtgagtggtagtaatgacgaaatggtttagagtttatatagttggagtaaaggagaaattgttgtagaattttttttttagtttcggtaaaattgggtttttgttatacgattaggaaagattaggtttgcggatatatagaagggtgaggaaaatggaatttattggatgaaaaggaaaaaggaaaaataatttttagtaaagtaagagagagttttgatagtaggtttttcggtttatagattgagttttaggttagtatataggaataggagaggttaggttttttttcgttgtaaacggtgtaaattttttaaagttttatttcgtttttttagtgtataggtgggtattatttagaaagaattagttaggaaaaggtgggttttatttaggattagtagtttaatttttgtttttgtttttggtattttttgagatagaattttgtttttgttgtttaggttggagtgtaatggtacgattttggtttattgtaattttcgttttttgggtttaagtgatttttttgttttagttttttaagtagttgggattataggcgtttgttattatgtttagttaattttttttgtatttttagtagagatagggttttattatgttggttaggttggttttgaattgttgattttaggtgatttatttgttttggttttttaaagtattaggatagtagtttagttttttagtttttaggttgttttagatttggaggtagggttttattagggatttttggttgttttttgtttttaaaatgttggtggggaggttgggatacgatgaataaggtagggaggatttattatatagggttatatttttatagggaaatttggattttgttttggggaaatatggattagttttttgtttgtttgtttgtttgtttgttttttgagttggagttttgttttgttatttaggttggagtgtagtggtataatttttatttattgtaatttttggttttcgggtttaagagagttttttgttttagttttttaaagagttgggattataggtatacgttattacgtttagttaatttttaaatttttagtagagatggggttttattatattggtaggttggttttaaatttttgattttatgatttgtcgtttttgttttttaaagtgttgggattataggtatgagttattacgtttagtttatggattagttttaagagggaataagataggttttgtatttttaaagattgttttagtagtagtgtggagtaggtagtgaggcgagggtggaggtgttataagagggagtgaagaattaatgagggttagagtagtaggagtagttaggtgtttagattagggaggtatttaggaggtaaatttggtagggtttggttattatgtataagtgaaagtagaggttagtatagatgtttgttaggttttcgttttggtcgaaaaggtatatgaaggtgtatgtaggtttaatgagtaggtatggaggaaagatgggtggttttaggggagatttagttttggttgtttagaggttgagaggtttaaggaatttttaggtgggtttttttagtaggtaatgagatagttttttttgaagtttaggagagaggtttagataaggaaaaacgtgatgtttattagtaaaaagttgatagttggagttatgtgtggagttacgattttttaaggagtgggtgtgtatataatgagaagattaagttttaagatagattatatgtgtaggtaaaatttttaataaagatattgagataatatttaatagaaagagtaaaaagattatgttgtaatgggtagtgggaagagaatttttagaggtttgtagtgatttataaggttaaattttgtatagtgggtaaggaaaaattttgaagaatgttcgtttgtggttatattttttgtagtttttattagtttgtgagtataaatgaagttatattggtcgggtacggtggtttacgtttataattttagtattttgggaggttgaggtgggtagattacgaggttaggagatcgagattattttggttaatacggtgaaatttcgtttttattaaaaatataaaaaattagtcgggtatggtggcgggtgtttgtagttttagttatttaggaggttgaggtaggagaatggtgtgaattcgggaggcggagtttgtagtgagtagagatcgtgttattgtattttagtttgggtaatagagtgagatttcgttttaaaaaaaaaaaaaaaaaaaaaaagagtaattatatatattttattagtttgttgttaattatttgtaaagtaggattgatttttttttaaaaaatgtttttattttttattttttaaggtgtattttttgagagtgtttgggagtgttttatataagttaaaggagagtttatacgtgttagtttatacgtatattttttttttatttatagtatttgacgtatttgtagtttttatggcggttttttattgagatgttttaaggtttatgttgggttttagtttttgttgtataatgtagtagaggtttttatgtttgttattttttattgagttgaagttatagtattttttgagaaatggagaggatattcgttttttgttatttttttgttttttattttttatatggtgttttataaaaaaattgtttttagtttgtgttttatggttatttgttttaaggttttagatattaggtagttttcgggattgagtgagaggtagataatagtttttttggattttagttttttggggtaggtgattaatttgtaaaaggttaggatatttagttaaatggttatttggtgatatagaggttatgattagtgtttgttaataatttagtagaatggttgataaggttagataataataaaatgagagaatggaggtgagaaaggtatagatagtaaattttatgaaagggtagaggtaggaaagtaggaaatggggagtggtggtggtggtggtggtttttaatttgaatatagtggtaggttgaggtattaggaagggaggagttaataatagatcggagaagagaaaggttttgagtgagtagtaggtgtaagtcgtgtggataaattttaggttgagggaatttaaggtaatagtttgagggttttgaaatagattttggattttttggtaggggtttttggaaggagtttggttatagggttttgaggtaaaagaatgaaaaaagagaggaggtttagattttgtggtagagtttattttggagggaagtgggaagtgggaagttcggagttttgattacgtgaggggttttttagttttgttatatttttttttttggatagagttgttatttagtttttttttcgtgatttagaatttggtttttttattttgttattttaattttagtaacgatgagagttatagtaaaaagttgtttttgggagtggatttttttttttttttttgatcgtagtatgtttgggattttttttacgtggtagtcgtggtgtttagttttggttttggtttcgtttttttgaagatattttggttttattataaaattttttggggaaaggatgatttacgtttaaaggatatagtttttttttgatttgtttatttaagttattatatattagagggggtcggaattagatttaggagtagaggattttgttttgcgggataaggagaatgggtattttggggaagagcgaaagattttttattgttataattcgtgttttataatatttgaagtgaatgtggtgtttgagttataatattatttttttttataaatagttaaaagtagagggttataaatataggtttaattagaaaaaaagatttttattttatttgtagttttgtattaaggattgtgttggaatttgtttttatattaaattgttgtttaagggttattaatttaaatggttatggggtgaagtcggtgttttaggtatgggtttgtcgttgggatttgtggtaaattaaagttattatttgttttatataaagggggtaatagttgttagttttagtagtttttattaaaaggtgtaagttttgtattgttcgatttgattttttagagagaagttttaagttcgaattgttttgtgagatttttagatttttaaatattgagaatgaattttattaaaaagattataataataaatatttattatatagtttaagtaaaatgttgtgagagtaatttttatgaggagtgtaaagttatagttttaattttattttttttaaagagatttttaagtgttttgttttttaagtgattttgtttgtattttaaaatataattgtattttttagagggaaaataagaatttgttttaagaagttattgtttttttagtttttttgtgagtaagtattttatgtttttttagaggtgattaaattttgattattgttaatgggtaggtattttttaaatgtttaaggataataaagatatttagagtgttttttatagttattaatgattaaatagtaagtattgtatttttgggtattgttaattagtgaagtatattagatggaaatgttttcgaagttgtttttttaaaattcgagtaagttattaggtaaatttcgtttttagggaggttttttattaaataggagttaattggttgggtcggggtttaatattttaagtaatatttgtaattgaggatttttttcggggagatcgtagtttatcggtatggtttaagagtttgtgaattgtaaaatttagtttgggaaggtggttgtgtttattaagtttatttgttcgtattgtaggagggtttaagagatttttagttaattgtttattaaataagggtttttggaatttgtcgatattatagttattaattatattaacgagatttaagattatttgtaatagtttacgggagtaagaacggtgagttttattttaaacggttagggaaaggttttcggattgtttttttttgttagagttgtgtttttttttaggataaggttgcggtttcgtattttaaggcgtttagagggttgtgcggggcggggggtgtgggggagggcgttttagagaggatttcggttatttgaatgagcggcggtattgtagttaaaggtttttacggggtagaagagggagtatagttgatgtttgttgtgcggtagggtaagtgggattagtagtttgtcggtgagtttttggggaattatttagagtttttgttttaagtattgttaggaaatgatagtttttagttggtagggttggaggtggaagttggggtggagggtcgggtgtgatgtgtttgttatttaatatgagatttatgttttttatttttttttttaggttttttttttttaatttgtttatttttttttatttaattttttttattggaaaaatttaatgtatcgttatttgttttttgttttaaattaattatggatgtttttaggttttatattgtagggaattatagtttggagttttggtttggtttttataatggttggttgtgtgattttgggtaagttattattttagtagtttttaaagattttagttgtaagattagattaggtgattttagagttttatttgttacgaatagattgtgggattttttaaaaattgtttttttttattcgaaagatttttttttttttagtatttttggttttgcgttttgggttttaggagggatgttagttatattatttgtattagttttgttgtgaggtgggatgagaaatgttttattagtttagttaagtttttttttacgatgtacgaattttatagtatagtgttaggttaagtatatattttattttagttttagtttgatttataaggttgtttttgggttttgagtataaagtattggaggttgtttttttttttttttttttaataagaagttagtattttggtgtagaaagggggtttagtgtgttattttattgttgtgtgttgaggttttggagtatatataatgacgagagaagtttttgttgtttagtgggattattagttgtataggatgtttaggttttgagaggtgtaaagggtagtgtaaatattattacgggttttattgtggttgttattttgaggattttttagttattggtttttaaattttgttgtatattaggattatttagagagtttttaaaataatttttatgtttaaattatgttttttaataattaaattataatgttagaggtgggagttaagtattagttttgtttgttcgtttgttttgagatagttttatttttgttatttaggttggagtgtaatggtgtaattttggtttattgtaatttttgttttttgggttttttttaattttttaagtagttgggattataggcgtttattattatgtttagttaatttttgtatttttagtagagacggggttttattatgttggttaggttggtgtcgaatttttgattttaggcgatttatttatttcggttttttaaagtgttgggattaaacgggtgagttattatatttgggatttttatttggaaaaattttttggggattttaatgtgtaatataattgggattattgtttttagtttaatagtatttattttttaggaggtaaagtaaatttttttatgtgtttatttaataattgttttttttttttttttgagatggaatttcgtttttgtcgtttaggttggagtgtagtggtgtgattttggtttattgtaatttttatcgtttaggtttaagtaattaagtagttggaattacgggtatttgttattatatttagttaatttttgtatttttattagagatggggttttattatgttggttaatttggtttcgaatttttgattttaggtgatttatttattttagttttttaaagtgtaggtgtgagttattatatttggttaataattgtttttttatttttttgtagaataataatattttttgtagtaattttttaaggtttttttttttttttttttttttaagagatagagttttgttttgttatttaggttagagtgtagtggtgtaatgatagttgattgtagtttcgaatttttgggtttaagtgatttttttattttagtttttcgtggttgggattataggtatgagttattatatttagttaattttttaagtttttgtatagatgggggttttgttatgttatttaggttggttttgaatttttggttttaagttatttttttattttagttttttagagtgttgggattatagatgtgatttattttaataagtttgttttttatttttagaaaaatgttttttatagatttttgaattttgagtgtattttttttaggggaagaataagttttttaaagttgtatgtttgatttttaatagggaagtgtttgtatttaaagggtttgaaagttttcgagggtttttttttttttttttttttttttgagacggagtttttttttgtgtttaggttggagtgtaatggcgtaattttagtttattgtaagttttatttttcgggtttacgttatttttttgttttagtttttcgagtagttgggattataggcgtttgttattatgtttggttaattttttgtatgtttagtagagacgggtttttattgtgttagttaggatggttttaattttttgatttcgtgatttattcgttttagttttttaaagtgttgggattataggcgtgagttacggcgttcggtttgattttgtagttttaattattttataaagtagttgtatttagtaggtaattagtaggatatgattatggaaagttagtggttttaattaagttatgtatttggtaaaatttgtttttgttttgttatagttatagtttttaaattagtgtttttatttattttttttttaatgtatttttttttatatagatttgagtttttgaattatattattttttttttttttgaagaatttttttgggtattttttgtaaggtgattttattggtaatatatttttttaagttttgtttattttagaaagtatttttttttcgtatttgaatgatgattttattggatgtaataaatatttttaagtatttattatgtattagatatttttatgtatattggggaaaaaattttgttttttttgttatgaaaaaaatttttttgtttttgttgaatttatattttagtgggggagataaataaatatagtaataaaatagtatgttgggagttggtaagtggtacgtgttatgaggaaaagtaggaaaggtagggaggaagtattagggtttagttttaaatggagttattgggttttattgagaagggaatattcgagtagatatttataggagttgagggagatgggtgtatataatttataggtagagtgaatgtaaaggttttggggtagacgtttgtttggtaggtttgtggaatagtaaggaagttagtatagttgtagtattgtgagttagtaggagagttagtggaggtgaggtttgagagttaataggagtttggaagaattgtgattggtattcggtgtgagatgagatgtttttggtgggtgttgagtagacgagttatttgatttgattttattttgaaagggttattttggtagttgtggggagaagagatagtagggtaaaggtgaaggttgaagttgggagatattgggaggttatagtagttatttaggtgatagatgaaggtggtttatattagggaggtagtcgaggagtgttgagaaattgtttttgagtagttgtatttgtgtaattttagttagcgtataggagatgttgtttggttgaggttggggaaatttagtgtaggagaataagaattataggattattaaattcgttttggggtggtagtttttttttttttttgatagtagcggatttttaagtttttttaaagaggaggttgggacgggaagggataggaggggaagtagtatagggtatttttttttttttgtttaattttattaatagtattttttgttttggttttattgttatagtattttcgtgtcgtttgtatagtttgttatttagttttcgttaggggtattatttattgatacgatttatggtagttttgtagttgtttagattagaggatgggtgtgagggtaaaggagtttttcgtttttttgttagatattgagtataaaattttacgttgggagtagtttggttatattttagggttattttaggaggttggggggtagttttagggttgtgggtttttaaagttttagttattttgtgagagtatagggaatagttatggaaatgtgtaagatttgtttttaatttttagattttatttttaatgtttatttttatttagattttttttttaataaaagtgttgtaagaatttatttataataatgaagtttttttttttattttttttattttttggataatttgttttaattattatgttttttgaggaaagtttaaagttttgaaaaatagttttattgttttttgtttttattttttttttttttttagtgcgtttttggtattcggggagaggttcgttggttttgatgacgcggtgatttttatggggtttttttttttattgttaggtagttttggtggaatatttttggtttataaatttagttacgttgagggtatttttttttttttcgcgattttaaaagttttttggaattttggaatgtgtttgtttttagtagtagggaggaagtgtgtaattagagaggagtttatttagtaggtgttatgattgtggtttggcgtgggtgacgtatttttattcggggtgagttaattattttatgatggattagcgattaaaggagatttaaatattattatatttttttggttgaggatagagtttatttgtgttgttttgttttgttttttttgttttgttttgtcgtttaggtgtgagtgtaatggtattattatagtttattgtagtttcgatttttcgggttaaagtaatttttttattttagttttttgagtagttgggattataggtatgtatcgttatgtttggttaatttttgtattttttgtagagacggggttttacgatgttatttaggttagttttgaatttttgggtttaagcgatttttttattttagttttataaaagtagtaggattatatttatgagttattgtgtttggtttttatttgtgttttaataatatagagagatgattgtatttaataaattatggatttgaaaaattagagacgtaatgtaaatatttttttagttgtatttagaaacgaatttttttttttttgattgttgtgatttagtttataattttaggtgtggtttttgatgtagagaaagtagagtttaatttaggtggtttgattgtagttaattagaattttttttttgaaatatgtttttgtagagtgaaatttttaaatttttttgataagttggataagtttatgtatagtatataatttgaaaatttttttggcgtaaaaatattttcgagttaataatgttattttttataatagaaaggaagttttgttttgtgagtatatatataaggaggttttaaagtgatttgaaaagtttggaattacgggaaatatttagtggtaggatagaaatgttttgtttaatttagtaatgtagtaatgttttgggtcgtgtgtttttttagg

SEQ ID NO: 68 - DNA, 11052 bp, Artificial Sequence
  chemically treated genomic DNA (Homo sapiens)
tttaaaaaagtatacgatttaggatattattatattattagattagatagaatatttttattttattattaaatatttttcgtgattttaaattttttaaattattttaaaatttttttatgtatatgtttataggataggattttttttttgttataaggggtaatattattaattcgagaatgtttttacgttagaagagtttttaagttgtgtgttatgtatgagtttgtttaatttgttaaagggatttaaaaattttattttatagaaatatgttttagaaggagaattttgattggttgtagttagattatttagattgaattttgttttttttgtattagggattatatttaagattgtaaattgggttatagtaattaggaaggaaggagttcgtttttaaatatagttggaaaagtatttgtattacgtttttgattttttaggtttatggtttattaagtataattatttttttgtgttgttaaaatataggtgagggttaggtatagtggtttatgaatgtaattttattatttttgtgaggttgaggtgggagggtcgtttgagtttaggagtttaagattagtttaggtaatatcgtgagatttcgtttttataaaaaatataaaaattagttaggtatggcggtgtatgtttgtagttttagttatttaggaggttgaagtggaaggattgttttggttcgggaggtcgaggttgtagtaagttgtgatggtgttattgtatttatatttggacgatagagtaaaataaagaaagtaaaataaagtaatataagtgagttttgtttttaattaggggggtgtagtggtgtttgagttttttttaatcgttggtttattataagatggttaatttatttcggatgagggtgcgttatttacgttaagttatagttatgatatttgttgaataggtttttttttagttatatattttttttttgttgttaggagtagatatattttagaattttagagggtttttagaatcgcgagggaggaggaaatatttttaacgtggttgaatttataggttaggagtgttttattaaggttgtttggtagtgaagaaaaaagttttatggaggttatcgcgttattagagttagcgggttttttttcgagtattaggaacgtattggaggggagggagaggtggaggtagaaagtaatgagattattttttaaagttttgggttttttttagaaagtataataattggagtaaattgtttaaaaagtgagaaaggtgagaaaaggggttttattattgtggataagtttttatagtatttttattaaaaagggggtttgggtgaaggtaggtattaaaaataaagtttaaaaattaaaaataaattttgtatatttttatggttattttttgtgtttttataggataattgaggttttgaaaatttatagttttggagttgttttttagttttttgagatgattttgaaatgtgattaggttgtttttagcgtggagttttgtgtttagtgtttggtaaagaagcgaaaggtttttttatttttatatttattttttagtttggataattgtaaaattgttataaatcgtattagtgaatggtatttttaacgggagttgaatggtaggttgtatagacggtacgggggtgttgtggtagtgaaattaaagtaagaagtattgttgataaagttgagtaaagaagaggaaatattttgtgttgtttttttttttgttttttttcgttttagttttttttttagaggaatttgagagttcgttattgttaaggagaggaaagaattgttattttaaaacgagtttggtaattttgtggtttttatttttttgtattaggtttttttagttttagttaggtaatattttttgtacgttagttagggttatataaatgtaattatttaaaagtaattttttaatatttttcggttatttttttggtataagttatttttatttgttatttgaataattattatagttttttaatgttttttagttttaatttttatttttgttttattgttttttttttttatagttgttagagtggtttttttaaaatggggttagattaagtgattcgtttgtttagtatttattaggggtattttattttatatcgagtattagttatagtttttttaagtttttattagtttttagattttatttttattaatttttttattggtttatagtgttgtaattatattggtttttttattattttataaatttgttaggtaaacgtttattttaggatttttgtatttattttatttgtaaattgtgtatatttattttttttagtttttatagatatttgttcgaatgttttttttttagtgagatttaatggttttatttaaaattggattttgatgttttttttttattttttttatttttttttatagtacgtgttatttattaatttttaatatattgttttattattgtatttgtttgttttttttattagaatataggtttaataaaggtagaagggttttttttatggtagaaaaggtagaattttttttttaatgtatataaaagtgtttggtatatagtaggtgtttaaaaatatttgttgtatttagtaaaattattatttaaatgcgaaggagaaatattttttaaggtaaataaaatttgagggaatgtgttattaatggaattattttgtaagaaatgtttaaagaagttttttagagagaagggaaatgatatagtttagaaatttagatttatgtaaagaaaagtgtattagaggagaaataaatgaaggtattaatttaggagttgtgattatagtaaaataaaaataggttttattaagtatatggtttgattgaagttattaattttttataattatgttttgttgattatttattagatatagttattttatagaataattaagattgtaggattaggtcgggcgtcgtggtttacgtttgtaattttagtattttgggaggttgaggcgggtggattacgaggttaggagattgagattattttggttaatatagtgaaaattcgtttttattaaatatataaaaaattagttaggtatggtggtagacgtttgtagttttagttattcgagaggttgagataggagaatagcgtgaattcgggaggtggagtttgtagtgagttgagattgcgttattgtattttagtttgggtatagagggagatttcgttttaaaaaaaaaaaaaaaaaaaaaaaaattttcgggagtttttagattttttgaatataaatatttttttgttggggattaaatatgtagttttaaaaggtttgttttttttttaggaggaatgtatttagaatttaagaatttgtgaaaaatatttttttaaaaatgaaaaataggtttgttgaggtggattatatttgtaattttagtattttgggaagttgaggtgggaggatagtttgaggttaggagtttaagattagtttgggtaatataataagatttttatttgtataaaaatttaaaaaattagttgggtatgatggtttatgtttgtagttttagttacgggaggttgaggtgggagggttatttaagtttaggagttcgaggttgtagttagttattattgtattattgtattttagtttgggtgatagagtaagattttgttttttaaaaaaaaaaaaaaaaaaaaaaattttaaaagattattataagaaatattgttgttttataaagaaatgaaaaagtaattgttgattaggtgtggtagtttatatttgtattttgggaggttgaggtgggtggattatttgaggttaggagttcgagattaggttggttagtatggtgaaattttatttttaataaaaatataaaaattagttaggtgtggtggtaggtgttcgtaattttagttatttgattgtttgaatttgggcggtggaggttgtagtaagttaaaattatattattgtattttagtttgggcgataagagcgaaattttattttaaaaaaaaaaaaaaagtaattgttaaatgaatatatgaagaggtttgttttattttttggaaaatagatgttgttgggttgagaataataattttaattgtgttgtatattggaatttttaagggatttttttaaataaaaattttaggtgtggtggtttattcgtttaattttagtattttgggaggtcgaggtaggtggatcgtttgaggttaggagttcgatattagtttggttaatatggtgaaatttcgtttttattaaaaatataaaaattagttgggtatggtggtgggcgtttgtaattttagttatttgggaggttgaggagaatttaggaggtagaggttgtagtgagttaagattgtattattgtattttagtttgggtgataagaatgaaattgttttaaaataaacgaataaataaaattaatgtttggtttttatttttgatattgtgatttagttattgaggggtataatttgggtataaggattgttttaaaagttttttaggtgattttaatgtgtagtaaagtttgggaattaatggttaaaaggtttttagggtggtagttatagtggggttcgtagtagtgtttgtattgttttttatattttttagggtttgggtattttatgtagttggtggttttattaggtagtaagagtttttttcgttattgtgtatattttaggattttagtatatagtagtaggataatatattaagttttttttttgtattaaaatgttgattttttattagagagaaggggagagaaataatttttaatgttttatatttagaatttagagataattttgtaagttaaattaaaattgaaataggatatgtgtttggtttaatattgtgttgtagaattcgtgtatcgtaaaagagaatttagttgagttggtgggatattttttattttattttatagtagaattgatataggtgatgtggttggtattttttttgaagtttaggacgtaaagttaaggatgttgaagagagggaagtttttcggatggaggagagtaatttttagagggttttatagtttattcgtagtaaatgggattttgaggttatttaatttggttttgtagttgggatttttgaggattattggggtggtgatttgtttaggattatatagttagttattataagagttaggttagaattttaggttatgattttttataatgtggggtttggaaatatttataattaatttagaataaggggtagataacggtatattagatttttttagtgggaggaattagataaggaagaatgagtaaattagaaaaagaaagtttagagaaaagaatgaagaatatgaattttatgttaaataataaatatattatattcggttttttattttagtttttatttttagttttgttaattgaaaattgttattttttggtagtgtttaaaataaagattttagataattttttagggatttatcggtaagttgttggttttatttattttgtcgtatagtagatattagttgtatttttttttttgtttcgtgaagatttttggttgtagtgtcgtcgtttatttaagtgatcgagattttttttaaggcgtttttttttatatttttcgtttcgtatagttttttggacgttttgaagtacggagtcgtagttttattttaaagaaaggtatagttttgataagaaaaggtaattcgggagtttttttttagtcgtttaaaatgaaatttatcgtttttgttttcgtgagttgttgtaaataattttgaatttcgttagtgtggttggtggttgtgatatcgataaattttagaagtttttgtttgatgggtaattgattgaggattttttgggtttttttgtagtacgggtaggtgggtttgatgaatataattatttttttaggttggattttgtagtttataaatttttgagttatgtcgatgggttgcggttttttcgggaagaatttttagttgtaggtattgtttggggtattgagtttcgatttagttagttggtttttatttaataaggaatttttttggaggcggagtttgtttggtagtttgttcgagttttaaagggatagtttcgaagatatttttatttggtatattttattagttagtaatgtttaggaatgtaatatttgttatttaattattggtagttatgaaagatattttgggtatttttgttgtttttggatatttggggagtgtttgtttattggtaatgattagagtttagttatttttggggaagtataaagtgtttatttataaaggggttgaggaggtagtgattttttagagtaaatttttgttttttttttaggagatatagttgtattttaaaatgtaaatagaattatttaagaaatagaatatttggaaatttttttagaagaagtgaaattgaaattgtgattttgtattttttatgaaggttgtttttatagtattttgtttggattgtatggtgggtgtttgttgttgtgatttttttaatggaatttatttttagtatttaaaaatttggaggttttataaaataattcggatttaaaatttttttttgaaaagttaggtcgggtaatatagagtttgtattttttagtggaagttgttggggttgatagttgttgttttttttgtatagggtaagtagtggttttggtttgttataggttttaacgataggtttatgtttgagatatcggttttattttataattatttgagttggtaatttttgaatagtagtttaatatggaggtaaattttaatataatttttgatataaaattatagatgaaatgagaatttttttttttggttgagtttatgtttgtgattttttgtttttaattgtttgtgaggggaagtagtgttgtaatttagatattatatttattttaagtgttataagatacgggttgtaatagtaggaaatttttcgtttttttttagggtgtttattttttttatttcgtaaagtaaagttttttatttttgggtttagtttcggttttttttagtgtatggtagtttaaataaataaattaaggaaaaattatgttttttaaacgtgaattattttttttttaggaagttttatggtgaaattagagtatttttaaagaggcggggttaaggttagagttggatattacgattgttacgtaagaggaattttaagtatattgcgattaagggaagggaagaaaatttatttttagaagtagttttttattgtgatttttatcgttattagaattaaaatggtaaaatgagaaagttagattttgagttacggagggggagttaagtgatagttttgtttagagaaaaggatgtggtagggttgggaggttttttacgtggttagggtttcggattttttattttttatttttttttaaagtaggttttgttatagagtttgagttttttttttttttttatttttttattttagaattttgtggttaggttttttttagaggtttttgttaggaggtttagggtttgttttagggtttttaggttgttgttttaagtttttttagtttgaggtttatttatacgatttgtatttgttatttatttagagtttttttttttttcggtttgttgttggtttttttttttttggtgttttagtttgttattgtgtttaagttaaaagttattattattattattattttttattttttgtttttttgtttttgtttttttatgaaatttattgtttgtattttttttatttttatttttttattttgttgttatttgattttgttaattattttgttgaattgttggtagatattaattatggtttttatgttattaaatgattatttagttaggtattttgattttttgtaaattagttatttgttttaagaggttgggatttagggagattattgtttgttttttatttagtttcggggattgtttggtgtttgaagttttaggatagatggttataaggtataagttaaaggtaatttttttgtgaggtattatgtggaaaatgggagataaagagatggtaaagaacgggtgttttttttattttttagaaaatgttgtggttttaatttagtgaaaaatgataagtatagaagtttttgttgtattgtatagtaggagttgaaatttagtatggattttagggtattttaatggaaagtcgttatggggattgtagatgcgttaagtgttgtggatggaaagagggtgtgcgtgtggattaatacgtgtggatttttttttggtttgtgtgagatatttttaggtatttttagaaaatatattttggagggtgggaagtgagggtattttttaggggagaattagttttgttttatagatggttggtaataagttagtgaaatatgtgtggttattttttttttttttttttttttttttgagacggagttttattttgttgtttaggttggagtgtagtggtacgatttttgtttattgtaagtttcgtttttcgggtttatattatttttttgttttagttttttgagtagttgagattataggtattcgttattatattcggttaattttttgtatttttagtagagacggggttttatcgtgttagttaggatggtttcgattttttgatttcgtgatttgtttattttagttttttaaagtgttgggattataggcgtgagttatcgtgttcggttaatgtgattttatttgtatttataggttgatgagggttgtaaaaaatgtggttataaacgaatattttttagggtttttttttatttattgtgtagggtttgattttgtagattattgtaggtttttggaagttttttttttattgtttattgtagtatgatttttttgttttttttattggatattgttttagtgtttttgttaagaattttgtttatatatatggtttattttggggtttgatttttttattgtgtatatatttattttttgagaggtcgtagttttatatatgattttagttgttagttttttattgatgagtattacgtttttttttatttggattttttttttaagttttagggaaggttattttattgtttattgaaaagatttatttggggattttttaggttttttagtttttaggtagttaaaattgaattttttttgaagttatttattttttttttatatttgtttattgagtttgtatgtatttttatgtattttttcggttagggcggaaatttggtaggtatttgtgttggtttttgtttttatttatgtatagtggttaaattttattaagtttgttttttgagtgtttttttggtttgaatatttgattgtttttgttgttttagtttttattagttttttatttttttttgtagtatttttattttcgttttattgtttattttatattgttgttggggtaatttttaaaaatatagaatttattttgtttttttttaaaattagtttatgggttgggcgtggtggtttatgtttgtaattttagtattttgggaggtagaggcgatagattatgaggttaggagtttgagattagtttgttaatatggtgaaattttatttttattaaaaatttaaaaattagttgggcgtggtggcgtgtgtttgtagttttagttttttgggaggttgaaataggagatttttttgaattcgggagttagaggttgtagtgaatggagattgtgttattgtattttagtttgggtgatagagtaagattttaatttaaaaaataaataaataaataaataaataaaaaattagtttatgtttttttaggataaaatttagatttttttgtggggatgtggttttgtgtgatgggttttttttattttgtttatcgtattttagtttttttattaatattttagagataggaggtagttaagggtttttggtgaaattttgtttttaagtttaaaataatttgaaggttgaaaaattggattgttgttttagtattttgggaggttaaggtaggtggattatttgaggttagtagtttaagattagtttggttaatatggtgaaattttatttttattaaaaatataaaaaaaattagttgggtatggtgataggcgtttgtaattttagttatttgggaggttgaggtaggagaattatttgaatttaggaggcgaaggttgtagtgagttaagatcgtgttattgtattttagtttgggtaataagggtaaaattttgttttaaaaaatattagaaataaagataaaaattggattgttggttttggatgaggtttatttttttttgattgattttttttgaataatgtttatttgtgtattgggaaggcggaatggaattttgggaagtttgtatcgtttgtagcgaggaggagtttggttttttttgtttttgtgtgttgatttggaatttaatttgtgagtcgggaaatttgttattaggatttttttttgttttgttgagaattatttttttttttttttttttatttaataaattttattttttttatttttttgtgtgttcgtaagtttaattttttttggtcgtgtgataagagtttagttttatcggaattaaggggaaagttttgtaataattttttttttgttttaattgtgtggattttgagttatttcgttattgttgttatttatattttggatttgttgttttttgtgtttagggtgtttttttttttatttttgtgtggttgatttttgttggtttaaagggatttagattaggatggtgtgttagtatttttaggaagtattttaaaatatatattttttttttttatgggatgggtgtttttttatggagtttatatgttatattgcgttttgatttattatatgttattgtttttttgtattaattttttgttatttatagtg

SEQ ID NO: 69 - DNA, 5856 bp, Artificial Sequence
  chemically treated genomic DNA (Homo sapiens)
tgggattataggtacgagttattacgttgtttggagatggggtttagttatgttgtataggttgtttttgagtttttaggtttaagttgtttatttgttttagttttttaaaagtgttggaattataagtatgagttattacgtttagttttttttggttatttttaaaagttatttttttttatttgagacggagttttgttttgtcgtttaggagtgtagtggcgcgattttagtttatggtaagttttgtttttcgggtttatattatttttttgttttagttttttgaatagttgggattataggtgtttattattatattcggttaattttttttgtatttttagtagagacggggttttattgtgttagttaggatggtttcgattttttgattttatgattcgtttattttggttttttaaagtgttgggattataggtatgagttatcgttttcggttaaaagttattttttagttatttgaaatattagtaaattttatagggtagaagttatgttgagagttgatgaataagttagaaaaagaatatgtggattttgggttagttgttgttttagaatggggattttttttgtaagttatgttagaattatttattagtagtgatagatgttttgtaaagtgtttgtttttgtggggtaggaagtgtttttcgtgaaattattttgtgttgtggattttttgtttttttagagtttttattcgggttttatttatagagatgtttagtattatttttggttggattgagaaaaagttgttggttttttgtttaaaggaaagggattatattttttttttatggttttgaaattagtgagttttattaaatgtttagtatttttttgaagttataaagaaagtgtttttgtaattttattgaggtttttggaaagtttttaagatagaattgtatgtatttttaaattttttatattttttttttagaaaatattttagaaaagtggattttagaagttaagtatttttgttttaacgtgtttattattttggttgggaataagaaggattttcggaatgatgagtatataaggcgggagttagttaagatgaagtaggtatgatttggggtaggattgttttgtagtatttttgaattagggttttaagtttggaggtttggggagtttagtaggaatttttataggttaggttgttttagaggtttagaagtttttttgtggttttttgatttttattaattgggatttttatagaagatttttaagatagtttattagttttgtgagatggaatgtttttttatgaggtagtgttatgtttataaggattgttggtttgagaatgaattattttattagtagttagtaattagtggttttagatgtaggaatttttttttttttgatatggagttttattttgttatttaggttggagtgtagtggcgtaattttagtttattgtaattttcgttttcggggtttaagcgatttttttgttttagattttcgagtagttgggattataggtattttttattatgatcggttaattttttttttttttaatagatggggttttattttgttggttaggttggttttgaattttttattttaagtgatttgtttatttttgttttttaaagtgtagggattataggtgtgagttattgtgtttggtttttgttagattttttatttttattttttgagatatagttttgtttttgttatttaggttggaatgtagtgatgttatttcggttgtaattttagtttttaaggtttaagtgatttttttgttttagttttttaagttgttgggattataggtatgtgttattacgtttggttaatttttgtatttttagtagagacgggttttttttatgttggttaggttggttttaaatttttgattttaggtgatttgttcgttttggttttttaaagtgttgggattataggtgtgagttattacgttcgggtttgttagatttttgattgttttttttagttattattttggtatatgtgaggttaaagataaattagtggtaattgaaagataaggaaattttgaaggttgggagtttagatagaaagttttaatgtttttttttttttttatttttaatgtttttttaaaagtgatgatggatgtggtattttggttttttagaaattagttggtttaatggtagggtttttttattggaggagaagtattgagatttttaatttaagtttttttatttaggtttttttgtttgaatgttaagggtaggttttattttttttagggtatttagttttggattggtagtttgagtaattttgtttttgattgattttttaattttttagggtttttttgattttttttttttattttttagtgaatattatgtttattagagattttatgtttggtagggggtagttattatatgttagtttaaaaattttataagtttagtagtttgttgttttttttttttgttttgttttttttgagaaggagttttattgtgtcgttaggttggagtgttgtggtacgattttggtttaattgtaattttcgttttttagatttaagcgatttttttgttttagttttttgagtagttggggttataggcgtttattattatatttaggtgattttttgtattttagtaaagaggggttttattatgttggttaggatggttttgattttttaaattcgtgattcgtttagtttagttttttaaagtgttgggattataggtgtgagttattatatttagttaagtttaatagtttttgaaagttttttttttttttaggttgggtatagtggtttatgtttgtattttagtattttgggaggtcgaggtgggtagattatttggttaggagttcgagattagtttggttaaaatggtgaaattttatttttattaaaaaattatttgggcgtggtggtgggtatttgtagttttagttattcgggaggttgaggcgggagaattttttgaatttaggaggtggaggttgtagttagttgagattatgttattgttttttagtttgggcgatcgacgagtaaaattgttttaaaaaaagaaaaaaaaattttttagatgaatttgaatattttttatttattatatgtatgttatattattagttaaaaggattatttttttttttttgttaggagtcggtgaaatttgaagaaggtagagatatggtaaataggattggcgtttttgggtatatggagtgtttagtaaagattaaagatggagtgagagaggtttttgaaatggttacgagagttgttttgtaagttagacgtgggaagaaaaaatttgggtgttttgttttgtgaaattttgttgtaagtatagtttttatgcggttaattttgaagtgttgtttattaattttagtgtatgattattggttttttttatttatttataatttatttaagattataaattagaagttattttgttattagtatttagaagttaattatgattattaacgatgtttaattcgtttggtttattagggtttttttgatattgttttaatagtttttttttgtatttttatttgatatattaggcgttaatttaaggaattttttaattttttgtttttttttagaaagagaaatagttggtaatttttgtgaattaggttgtaattattttataattaatatgttttgtttattatttgttagttgtaaggtattttggtgagttattattttagggttttatttcgtaatagattttgttggtatagttttggggtgggtagttttttgaaaatgggtttaattagaaaagtttaagtttatgtagttgtggtagagttatagttttgtggttttatgttagttattttatagttattgtgtaattagtgttatttaatgtatgttattaaaaataaatatatttattttagattagatgtagtattttttgtataattggattttttaatattgttatttttaaagaaagtgtattggttttttaaaaaagaaagtgtatttggaaataaagttagatggaaaatttattttttaaattttcgttttgttattttttttgataaaagatggttatattattttttttcggttttatgtattttagtattttatggagttgggttaagtaaataggaattggttttacgtttgaggtaattagatattttggaagatggtataatttgttttatttggatttaagtatttggttttaatttatagtgtttttttttttttattgtatttaggtttttttttagaggagttattagtttttatgggtggtatttagttttttttttttttagttgattaaattttttttttgtattagttaatttttttaattattaatagaataaaggtagttttttaaattttttgtattttgttgtttgtgttgttttttttagggttgggggtaggaggatgtaaggattttttggtttagtttattttggagaggtttgttgagtgtaaaggattagtttgtgttttattttttatttatttagtagttaatttggttttttttaataatatggaaatgattattttgtatcgtattttggtttagatttgggggtagggtgaatgtagtttgaggaggttagggagggaggatttcggtagcgtttttttggtttcggcgagttattgggttttatttaaggaggttggggtagagtttttaggattttgttcggttagaaaattcgtacgagggcggtgtcgttttggagatagggaggagggagatcggaagtttagatttttttggttgttttttgtattgtcggtaatatggtataggagaggagggttgtttgtgtacgggtagtttttgtagttgttgtcgtcgtttattagttttttatgttaaattttatattttaatttaggaatttttgagaaaaaacggagttttcgagggttttagtttttggaagggtaatttggatcgttgtcgtttggttgtttgggttagattagatatgtttgttgtttttttcggtttaggaggagtacgcgtttcgttcgggcgtattttttagtttttttttggttgaggaggggtcgagtttttcgggtagggcgggggtcggatgaggcgggatttttaggttcggaaaattgtttgtgttacgtgattcgtcgtcggttagttaaaaggaggcgtttgttggtttttttttatagtgtttgttcggggcgtttcgttggttttttggataattgcgttatgtgtgttgttcggttagcggcggcggcggcggcggtttagtcggtgtatgttttttcggcgcgttcgttggtcggcggggagtttgtgagtttgggttttttgcggggtaaggtattatttatcgagaatgtggcgtttttttgaggtattacggttcgggattatatttagatgaacgagttgtagcggcgtttcggatttcggggtttggtggtgttcggtttttcgtgtaattagtttgggtattaggtgcgtcgggcggagcggggcggggcgggggcggacgtgtagtagtggttgggggcgtcggcggtgtgttggtgggtgtcgtcggttttatgcgcggagagtttggttattttttcgttttttttttgttgttcgtagttgttgaaattttttttcgtttttgggattgcgtatggagggtaaaatttcggtgatttatagaaaattttttttgtttgtggttagaacgttttttttttttttttgatttcgggttttagttgttttttttttttgtagg

SEQ ID NO: 70 - DNA, 5856 bp, Artificial Sequence
  chemically treated genomic DNA (Homo sapiens)
tttataggagagaagggtagttagaattcggggttaagaggaggagagaaacgttttaattataaataagggagattttttatgagttatcgggattttgttttttatgcgtaattttaagggcggagaggaattttagtagttacgagtaatagaaaggaaacgagagagtagttagatttttcgcgtatggagtcgacggtatttattagtatatcgtcggcgtttttagttattattgtacgttcgttttcgtttcgtttcgtttcgttcggcgtatttgatgtttaaattggttgtacgggaagtcgagtattattaggtttcggggttcgaggcgtcgttgtagttcgtttatttgggtgtagtttcggatcgtggtgttttagagggacgttatattttcgataagtagtattttgtttcgtagggagtttaggtttataggtttttcgtcggttagcgggcgcgtcgagaaggtatatatcgattgggtcgtcgtcgtcgtcgtcgttagtcgagtagtatatatggcgtaattgtttaagaagttagcggagcgtttcgaataagtattgtaaggggaggttagtaggcgtttttttttaattggtcggcggcgggttacgtggtataggtagtttttcgggtttgagggtttcgttttattcggttttcgttttattcggagggttcggtttttttttagttaggaaaaggttggagagtgcgttcgagcgggacgcgtgttttttttaagtcggaaggagtagtaggtatgtttggtttggtttaggtaattaggcggtagcggtttaggttatttttttaagggttggggttttcgagggtttcgtttttttttagaggtttttgagttaggatgtggggtttggtataggaggttggtgggcgacggtagtagttgtaggagttgttcgtgtataaatagttttttttttttgtgttatgttatcggtagtgtaggggatagttagagggatttaggttttcggttttttttttttttgtttttaaagcggtatcgttttcgtgcgggttttttaatcgggtagagttttggaagttttgttttagtttttttaagtggagtttagtagttcgtcgaggttaaggaaacgttgtcggagttttttttttttggtttttttaggttgtatttattttatttttaaatttgaattagaatgcggtatagggtaattatttttatgttgttgggagggattagattagttgttgggtgggtgggaggtggggtataagttagttttttgtatttaataaatttttttagggtgagttaggttaggaagtttttgtatttttttatttttagttttggagagagtaatataaataataggatataggaagtttagaaaattgtttttattttattagtagttggaaaaattaattggtatagaaaaaaagtttagttagttggagagaagagagattgagtgttatttatgagaattggtggtttttttgggagggaatttggatatagtgaggagaaaagagtattgtgaattagagttagatgtttaagtttaggtgagataggttatgttattttttaaagtgtttaattgttttaggcgtgaaattaatttttatttatttagtttagttttatggggtattgagatatatggggtcgaaaaggggtaatatggttattttttattagaaaaagtgataaaacgggaatttaaaaaatgaattttttatttgattttatttttaaatatatttttttttttaaaaaattaatatattttttttgaggatgatagtattaggaaatttaattatataaaaaatattatatttagtttggggtagatatatttatttttggtaatatatattaagtggtattaattatatagtaattataaggtaattaatatgaaattatagaattgtaattttgttatagttgtatgaatttgggtttttttggttgagtttatttttaaaaaattgtttattttagagttatgttaataaaatttgttacggagtaaagttttgaagtggtgatttattagagtattttgtagttgatagataataggtaggatatgttagttataaagtagttatagtttaatttataaaagttattaattgtttttttttttagaaagaagtaagaagttaagaaattttttgaattagcgtttggtgtgttaggtgggagtgtagaggagggttgttagagtagtgttaaaaggattttggtgggttagacgggttggatatcgttaataattatagttggtttttaaatattggtagtaagatgatttttgatttgtaattttaggtaaattatagataaatgaaaaaggttagtaattatatattaagattaataaatagtattttaaaattaatcgtataagggttgtgtttgtagtaaggttttataagataaggtatttagattttttttttttacgtttagtttgtagagtagttttcgtagttattttaaaaattttttttattttatttttggtttttgttgaatattttatgtatttaaaagcgttaattttgtttgttatatttttgttttttttaggttttatcggtttttagtaaagaaaaaaaaatagtttttttagttaatagtgtggtatatatatagtaagtaaaaagtatttaaatttatttaaaagatttttttttttttttttgagatagttttgttcgtcggtcgtttaggttggagggtaatggtatgattttagttgattgtaatttttattttttgggtttaagggattttttcgttttagtttttcgagtagttgggattataggtgtttattattacgtttaagtaattttttagtagagatggggttttattattttggttaggttggtttcgaatttttgattaagtgatttgtttatttcggttttttaaagtgttgggatataggtatgagttattgtatttagtttaaaaaaaaaaaagatttttaaaagttgttaaatttggttgggtgtggtggtttatatttgtaattttagtattttgggaggttgagttgggcggattacgagtttaggagattaagattattttggttaatatggtgaaatttttttttattaaaatataaaaaattatttgggtgtggtagtgggcgtttgtaattttagttatttaggaggttgaggtaggggaatcgtttaaatttgggaggcggaggttgtagttgagttaagatcgtgttatagtattttagtttggcgatatagtgaggtttttttttaaaaaaaataaaataaaaaaaaaaaataataaattgttaaatttatgaaatttttaaattgatatatggtaattattttttattaaatataaaatttttaataaatatggtatttattgggaagtagagggaagaggttagaggagttttggaaggttaaggagttaattaagagtaaaattatttaagttattaatttaggattaaatgttttgaaggaaataaagtttatttttgatatttagatagagaaatttgagtaagagaatttaagttgaagattttaatgttttttttttagtgaggaagttttgttattaggttagttggtttttgagaggttaagatgttatatttattattatttttaaaaaggtattgggagtggaggagagggaaggtattagggttttttatttggatttttagtttttaagatttttttattttttagttgttattaatttatttttggttttatatgtattaaagtaatagttggggaaggtaattaagagtttaataggttcgggcgtggtggtttatatttgtaattttagtattttgggaggttaaggcgggtagattatttaaggttaggagtttgagattagtttgattaatatggagaaaattcgtttttattaaaaatataaaaattagttaggcgtggtggtatatgtttgtaattttagtaatttgggaggttgaggtaggagaattatttaaattttggaggttgaggttgtagtcgagatagtattattgtattttagtttgggtgataaaagtaaaattgtgttttaaaaaataaaaataaagagtttaatagaggttaggtatagtggtttatatttgtaatttttgtattttgggaggtaaaagtgggtagattatttgaggtaaggagtttaagattagtttggttaatagggtgaaattttatttattaaaaaaaaaaaaaattagtcggttatggtggagggtgtttgtagttttagttattcgggagtttgaggtagaagaatcgtttgaatttcggaggcggaggttgtagtgagttgagattgcgttattgtattttagtttgggtgatagaatgagattttatattaaaaaaaagaaagtttttatatttagagttattgattattagttattaatgaaatggtttatttttaggttagtagtttttatgggtatagtattattttataaaaaaatattttattttataggattggtgaattattttagggattttttgtgaagattttaattaatgagggttagagggttatagaggggtttttgagtttttaaaataatttggtttgtgaaggtttttgttgggttttttaaatttttaaatttggggttttagtttaagaatattataagatagttttgttttagattatgtttgttttattttggttagttttcgttttgtgtgtttattatttcgaagattttttttatttttaattaggatgatgggtacgttgggatagaaatgtttgatttttggggtttatttttttgggatgttttttgaaagaaaaatgtagagaatttggggatatatataattttattttgaagattttttaagaattttagtgaaattgtagagatattttttttgtggttttagaaaaatgttagatatttaatgaaatttattagttttaaaattataaaaaggaaatataattttttttttttaaatagagaattaatagtttttttttagtttagttaagagtggtgttgagtatttttgtaggtggggttcgagtaagggttttggaggagtaaaagatttataatataaggtagttttacggggggtattttttgttttataaaggtaggtattttataggatatttgttattgttggtagatgattttgatatagtttatagaaggggtttttattttagggtagtagttgatttagggtttatatgttttttttttaatttgtttattaatttttagtataatttttattttatggggtttattggtattttaaatggttgaagagtgatttttggtcgggagcggtggtttatgtttgtaattttagtattttgggaggttaaggtgggcggattatgaggttaggagatcgagattattttggttaatatagtgaaatttcgtttttattaaaaatataaaaaaaattagtcgggtgtagtggtgggtatttgtagttttagttatttaggaggttgaggtaggagaatggtgtgaattcgggaggtagagtttgttatgagttgagatcgcgttattgtatttttgggcgatagagtaagatttcgttttaaataaaaaaaagtgatttttgaaaataattaaaagaggttgggcgtggtgatttatatttgtaattttagtatttttgagaggttaaggtaagtagatagtttgggtttaggagtttaagaatagtttatgtaatatggttaaattttatttttagatagcgtggtggttcgtgtttgtaatttta

SEQ ID NO: 71 - DNA, 6223 bp, Artificial Sequence
  chemically treated genomic DNA (Homo sapiens)
tgtttgtgatttagggaagggggttagtgtttggtaggacggatttgagggaggagaggaattggagatgtggggtagatatatggggcggggagggttaggagacggataggttttaggagtggattttatgatataagaaagggtatttggagtaaagattaagtagtgatttgtaaatttgggggtaggggtggattgagaggttgagtttaagttaggggcggtttggatgataatagtaaagttagaggttcggaagttaggttatgatttatatatagggtaggtgaaaatgtaagatggtgtagtcgttatagaaagtagtttggtcggttaggcgtagtggtttacgtttgtaatttaagcgttttgggaggttgaggtaggcggattaattgaggttaggggttcgagattagtttggttaatatagtgaaatttcgtttttattgaaaatattaaaattagtcgagtatggtggtgtaggtttgtaattttagttatttgggaggtcgagggaggagaatcgtttgaatttgggaggtggaggttgtagtgagtcgagatcgtgttattgtattttagtttgggtaaaaagagtgaaattttattttaaaaaaaaaaaaataataaatagtttggtggatttttaaattgttatataaagagttattatatgatttagtaattttatttttaggtatatatttaagagaaatgaaaatatacgtttatataaatatttgtacggttttataaatttaaaaagagaaaatagtttatagtcgggtatggtggcgtatgtttgtaattttagttatttaggaggttgagaaaggagaattgtttgaatttgggaggcggaggttgtagtgatttgagattgcgttattgtattttagtttgggtaatagagtgagattttgttttaaaaaaaaaaattttagatgtttatttatagatgaataaataaatataatgtgatttttttatatattggaatatttttgagttatgaaaaggaatgatgaggttttgatataggttataatgtggatgtagtttgaggattttatgtttagtgagagaagttaggtataaaagaatacgtagtgtgtgattttatttttatgaaatgtttaggataggttaatttatagagataggaggggatgtgtgtgtgttaggttttaggggaggagatggagagtgaaggttgatggggtttgggttttttttggggataatgaaaatattttgtgttgggtgcggtggtttacgtttgtaattttagtattttgggaggtttaggtaggcggattatttgaggtcgggagtttgagattagtttgattaatatggagaaattttgtttttattaaaaatataaaattaattgggtgtggtggcgtacgtttgtaattttagttatttgggaggttgaggtaggagaatcgtttgaatttgggaggtggtagtgtagtgagttgagatcgtgttattgtattttagtttgggtaataagagcgaaattttgttttaagagaaaaaaaaaattttggaattagatagatagaggtgatggttttataatattgtatacgttttaaaaatattgaattgtatattttgaagtgttaaaatgttgaattttatatgtattttgtttgaattttaaaaattttttttttttttgagatagagttttgttgtatttttttaggttggagtgtagtgatacgaattcggtttattgtaatttttatttttagggtttaagtaatttttttgttttagttttttgagtagttgggattataggagtacggtattatttttagttaatttttgtatttttagtggagatggggtttttttatgttggttaggttggttttgaatttttgatttcgtgatttattcgttttggttttttaaagtgttgggattataggcgtgagttattatgtttggttttaatttttgtatttttagtagagatagtttttttatgttggttaggttggttttaaatttttaattttaggtgattcgtttgtttcggttttttaaagtgttgggattatagatgtgagttatcgtatttagttaaaaagttttttttgagacggagagtttcgtttttttgtttaggttggagtgcggtggtgcgatttcggtttattgtaagtttcgtttatcgggtttatattatttttttgttttagtttttcgagtagtagttgggattataggagttttcgattatatttggttaattttttgtaattttagtagagacggggttttatcgtgttagttaggatggtttcgattttttgatttcgtgatttgttcgttttagttttttaaagtgttgggattataggtgtgagttattatgtttggttaaaaagattttaaaaaagaaatgaagttataggatagtttttttttagttttttttggagttaggggttgttttagaaagatatgtggtaatatagttttttgtagggatatttaagaattttcgtttttatagggttggagttttgagaggttttcgagattttattttttcgttcgtgaaatggggatattttgggaaaagttgtgaagtttttagtataaattttttttagagtttggggtttcgtttttagattcgaggtcgcgatttcgtgttttttttatttttgattttattataattggtaggaagttaggaatgggattaagttttttcgcggagttgtgggtgttgagttgtttttttggtaattttgaaataaatttttattttagtgtatatgtttgtaataaatttaaggaaaataatatcggtaaaattgcgaatagttgagttttcgtaagggtaagaatagagttattagtgtggttttgttattcggtattgttagggcgggaggaaatgggggggttttttgagaagttagataatgggagttgattttaagaatttagtttttaggggttgggcgggagtaaagttatgtgaatagatttatgtaagattaggattcggttagttttgtttagggatttttgttttattgtttttgttattaaattatttatgacgtttttgtgttgtatttggtaggtttgagtcgggggtagtggcgggggtaggtttatagtattttttaagttaattcggttttgagtttgtttttgaagaaatatttagtgtagggttagaaaaggttaagattttgaggataatatataaattttaagtatttaggcggggtagagtggtttatatttgtaattttagtattttgggaggtcgaggtaggcggattatttgaggtcgggagttcgagattagtttgattaatatggtgaaagttcgtatttattaaaaatataaaaattagttgggcgtggtagtatatgtttgtaattttagttatttaggagattgaggtaggagaattatttgaattcggaaagcggaggttgtagtgagttgcgatggagttattgtattttagtttgggtgatagattaagattttttaaaaaaaaaaaaaaaaatttaaatttttgtttgtataggggttaaagtttaattacggtgatttagtttttaagtatgagatgagtgtttttgttgttatatgtttaagttacgaagtgaaaaatagagttggaagttaagatgtggggtagtatgggttcgggtgtgtttatattttgtaatgttagaagtgtaagaaaattttttagatttgtgtttattttttgagtatatatcgcgcgtttttgcgtgggtagttgtttttgggggtgggagtttaggaaattttaggtttttagttaagtggtaattgttttgatgatttttaggttttagtgtttatattatataagcggtttagtaattagatttaggatggggagttattgattttttgcgtttatggtaggggtgagggtagggatatttttataagatggagttgtgatgagaagtaaatttaatttagtttggttttatttatattaaaaaggtaaattttttggtcggatgcggtggtttatatttgtaattttagtattttgggaggtttaggcgggtagattatttgaggttaggagttcgagattagtttggttaatatggtgaaatttcgtttttattaaaaatataaaaaaattagttgggtgtggtggttcgttcgtgtaattttagttatttaggaggttgagttaggagaatcgtttgaattcgggggttgggtggaggttgtagtgagttgagatagcgttattgtattttagtttgggtaaaagagtaaaaaaattgtgtttcggaaaaaaaaaaaaaaaaaaggtaaatttcggtcgagtttttggtttacgtatgtgattttagtatttttgggaagttgaggttggaggattatttgaggttagaagtttgagattagtttaggtaatatagcgagatttttatgtttataaaataataattagttaggaatggtggatgagtttgttgttttagttattcgggaagtagagacgggaggttcgtttgagtttgggaggtcgaggttgtagtgtgttttgatcgtgttattgtacgttagtttgggtaatatagtaagatttcgtgttttaaaaaaaaaaaggtaaataagagttggggatatttttttgcgagttggagaaattaaattttttcgacgagttttaagtagtatttttaggttgtttggtttgcggtcgcgttgttgttaattagtcggataattgcgttgtttttcgacgcgtcgttagttaggttacggttttttagatataagcgagtatgcgtagtcgttaataataagttcgtacgttcggtttcgttttttttttttcgttttttttttatttcggttttttattggttgacgtcggcgcgagcgtttaatatcgacgcgtttgattaatgagcgttttggagggcgtggtcgtgggaaaggaggcgcggaaagtcgacgcgcgtttattggtcggttggacgaggggaggagtcgttggtttttagtttcgtcgcgatgagtttcggtcgtttttgtcgtttattgaagtcggcgttgttttgtggggttttggtcgcgtttggtttggtcgggattatggtgagttagcgtcgcggtcgttgtcggttcggtgatcgttggggcgggcgcgcgatttttgttttcgttcgtcggcgtggggaatttttaggttttagtgattttggtggggggcgtttgggggttttttttttttattttcggtcgggtacggacgcgggtgatcgtattgcgacgcgtttcgcggttttttaggtcgttgtaggcgcgcgggttggggtcggggaaggggaaggggttgttttacgcgcgcgggtcgtggtcggggaaggggtcgtttaggtcgttgtaggcgcgcgtgtcggggtcggggtcgggggtttaggtttgtagggggcggggttcgggacggttggggcggagttggatcgttgagggttacggcggggcgttttcgggtcgagcggggttgttgcgttcgagcggttgggggcgcggagggttggaaatttcggattacgcgttttcgggcgtcgtttcgttttcgtattttggtttagcgcggtggcgttatagtcgcgtagttttgattacggttttcgggttttttgttttcgttagcggcgttcggggtgggggagttaggaggggcgggagacgggcgggtatgggtcgcgcgggcgtaggttttttcgggcgtcgtaggtagcggtgttagagtcggggtaggcggcggtcgcgagtttttcggcggcggaaggttttagcgtgtaggcgtaggagggcgcggcgtcggcggaagaagttttgttttcgtagtttgcgatcggagatttacgaatgttttaagttttaggattcggtgcgcgcggggtttttatatcggttaatgtggtatattttggggttggaattttttttcggttttcgggttttcggtaaaatcggattagaagtataagggggcgtgtgcgtttaaggaggaggagcgtttaggtttttagggtcgtagggtttcggtgttttcgttatcgattcgttttcgatttttttttgttttagggtttcgggtttagtttttcgtttacgttttttgtttagttttttttgttttgtagt

SEQ ID NO: 72 - DNA, 6223 bp, Artificial Sequence
  chemically treated genomic DNA (Homo sapiens)
attgtaaggtaaaggaagttgagtagggagcgtggacgggaggttgagttcgggattttgaggtaggaagggatcgggagcgggtcggtggcggggatatcgaggttttgcggttttgaagatttgaacgttttttttttttaaacgtatacgtttttttgtatttttggttcggttttatcggagattcggaggtcgggagagggttttaattttaaaatgtgttatattagtcggtgtgggggtttcgcgcgtatcgggttttgggatttgggatattcgtggattttcggtcgtaagttgcggggatagggtttttttcgtcggcgtcgcgtttttttgcgtttgtacgttggggtttttcgtcgtcgaggggttcgcggtcgtcgtttgtttcggttttggtatcgttgtttgcggcgttcgggggagtttgcgttcgcgcggtttatattcgttcgtttttcgttttttttggtttttttatttcgagcgtcgttagcggggataaagggttcggaggtcgtagttaggattgcgcgattgtgacgttatcgcgttaggttaaggtgcgggggcggggcggcgttcgggggcgcgtgattcgggatttttagtttttcgcgtttttaatcgttcgggcgtagtagtttcgttcggttcggagacgtttcgtcgtggtttttaacggtttagtttcgttttagtcgtttcggatttcgttttttgtaagtttggattttcgatttcggtttcggtacgcgcgtttgtaacggtttggacggtttttttttcgattacgattcgcgcgcgtggaataatttttttttttttttcgattttagttcgcgcgtttataacggtttggagggtcgcggagcgcgtcgtagtacggttattcgcgttcgtgttcggtcgggggtggggagggggagtttttagacgttttttattaaggttattggagtttgagggttttttacgtcggcgagcggaggtagggatcgcgcgttcgttttaacggttatcgggtcggtaacggtcgcggcgttagtttattatggtttcggttaggttaggcgcggttagagttttatagagtagcgtcggttttagtaggcggtaaaggcggtcgaggtttatcgcggcggggttgggagttagcggttttttttttcgtttagtcgattaatggacgcgcgtcggtttttcgcgtttttttttttacggttacgttttttagagcgtttattggttagacgcgtcggtgttgagcgttcgcgtcgacgttagttaatgggaggtcggagtgggaagaaggcggggaagggggggcgggatcggacgtgcggatttgttgttggcgattgcgtatgttcgtttgtgtttaggaggtcgtggtttggttggcggcgcgtcgggaggtagcgtagttattcggttggttgatagtagcgcggtcgtaggttagataatttgagaatattatttaagattcgtcgagggggtttggtttttttaattcgtagaaaagtgtttttaatttttatttatttttttttttttaagatacggggttttgttgtgttgtttaggttaacgtgtagtggtacgattagggtatattgtagtttcgattttttaggtttaagcgaatttttcgtttttgtttttcgagtagttgggataataggtttatttattatttttggttaattattgttttgtagatatgggggtttcgttatgttgtttaggttggttttaaatttttgattttaagtgattttttagttttagttttttaaaagtgttgggattatatgcgtgagttaaaggttcggtcgggatttgtttttttttttttttttttttcgagatatagtttttttgtttttttgtttaggttggagtgtagtggcgttattttagtttattgtaatttttatttagttttcgggtttaagcgatttttttgatttagttttttgagtagttgggattatacgagcgagttattatatttagttaatttttttgtatttttagtagagacggggttttattatgttggttaggttgatttcgaatttttgattttaggtgatttgttcgtttaggttttttagagtgttgggattataggtgtgagttatcgtattcggttaagggatttgtttttttaatgtaaatgaaattaaattgagttgggtttgttttttattatagttttattttatgggggtgtttttatttttatttttgttatgggcgtagggggttagtgattttttattttgggtttggttgttgagtcgtttgtataatgtgggtattgagatttgagagttattaagatagttattatttaattgagaatttggagttttttgggtttttatttttaggggtagttgtttacgtagggacgcgcggtatgtgtttagaaaataaatataagtttggagggtttttttatatttttaatattataaggtatgggtatattcgagtttatattgttttatattttggtttttaattttgttttttatttcgtggtttggatatgtggtaatagaaatatttattttatatttgggaattgagttatcgtgattggattttgatttttgtataggtaggggtttggatttttttttttttttttgaggagttttggtttgttatttaggttggagtgtagtggttttatcgtagtttattgtaattttcgtttttcgggtttaagtgatttttttgttttagttttttgagtagttgggattataggtatgtgttattacgtttagttaatttttgtgtttttagtagatacgggtttttattatgttggttaggttggtttcgaattttcgattttaggtgattcgtttgtttcggttttttaaagtgttgggattataggtgtgagttattttatttcgtttaggtgtttgggatttgtatgttgtttttaaggttttaattttttttgattttgtattgagtatttttttagagatagatttagggtcgggttgatttggggggtgttatgagtttgttttcgttattgttttcgatttaggtttgttagatgtagtatagaggcgttatggatggtttggtggtagaggtagtgaagtaaggatttttgagtagggttggtcgaattttggttttgtataagtttgtttatatggttttgttttcgtttagtttttagaggttgagtttttggagttaatttttattgtttgattttttaggaaatttttttattttttttcgttttggtagtgtcgggtgatagggttatattggtgattttgtttttgtttttgcgaaggtttagttgttcgtaattttgtcggtgttgttttttttaagtttgttgtaaatatgtgtattgaaatgggagtttattttagggttgttagaaaaatagtttagtatttatagtttcgcggagagatttgattttatttttgattttttgttaattgtgataaagttagaagtggggaaaatacggggtcgcgatttcggatttgagaacggggttttaggttttgggagagatttgtgttgggggttttatagttttttttagagtgtttttattttacgaacggggaaatggagtttcggggattttttaaggttttagttttgtgagggcggaagtttttgagtgtttttgtaggaagttgtgttgttatatatttttttagagtagtttttggttttaggaaggattggggaggggttgttttgtggttttattttttttttaagatttttttggttaggtatggtggtttatatttgtaattttagtattttgggaggttgagacgggtagattacgaggttaggagatcgagattattttggttaatacggtgaaatttcgtttttattaaaattataaaaaattagttaggtgtggtcgagggtttttgtagttttagttattattcgggaggttgaggtaggagaatggtgtgaattcggtaggcggagtttgtagtgagtcgagatcgtattatcgtattttagtttgggtaagagagcgagatttttcgttttaaaaaaaattttttggttgggtgcggtggtttatatttgtaattttagtattttgggaggtcgaagtaggcggattatttgaggttaggagtttgaggttagtttggttaatatagggaaattgtttttattaaaagtataaaaattagggttaggtataatggtttacgtttgtaattttagtattttgggaggttaaggcgggtggattacgaggttaggagtttaagattagtttgattaatatggggaaattttatttttattaaaaatataaaaattagttgggagtggtgtcgtgtttttgtaattttagttatttaggaggttgaggtaggagaattgtttgaattttggaggtggaggttgtagtgagtcgagttcgtgttattgtattttagtttggggggatatagtaagattttgttttaaaaaaaaaaaaagtttttgaaatttaaataaaatatatatgaaatttaatattttaatattttaaagtgtataatttagtgtttttaggacgtgtataatgttatgagattattatttttatttatttagttttagaatttttttttttttttgagatagaatttcgtttttgttgtttaggttggagtgtagtggtacgattttagtttattgtattgttattttttaggtttaagcgatttttttgttttagttttttaagtagttgggattataggcgtgcgttattatatttagttagttttgtatttttagtagagatagggtttttttatgttggttaggttggttttaaattttcgattttaggtgattcgtttgtttaggttttttaaagtgttgggattataggcgtgagttatcgtatttagtatagagtatttttattgtttttaaaggaagtttagattttattagtttttattttttatttttttttttaggatttggtatatatatatttttttttgtttttgtggattggtttgttttggatattttatggaaatgggattatatattgcgtgtttttttgtgtttggttttttttattgagtatgaggtttttaggttatatttatattgtggtttgtgttagagttttattatttttttttatggtttagaaatattttagtgtgtggagggattatattgtgtttatttatttatttgtggatggatatttggggtttttttttttgagatagagttttattttgttatttaggttggagtgtagtggcgtaattttaggttattgtaattttcgttttttaggtttaagtaattttttttttttagttttttgaatagttgagattataggtatgcgttattatgttcggttatgggttgttttttttttttgagtttgtaaagtcgtataagtgtttgtgtgggcgtatgtttttattttttttgggtgtatgtttaggagtggaattgttgagttatatggtgattttttgtgtaatagtttgaggatttattagattgtttgttgtttttttttttttgagatggagttttattttttttgtttaagttggagtgtagtggtacgatttcggtttattgtaatttttattttttaggtttaagcgatttttttttttcggttttttaagtagttgggattataggtttgtattattatgttcggttaattttggtatttttagtagagacggggttttattatgttggttaggttggtttcgaatttttgattttagttgattcgtttgttttagttttttagagcgtttggattataggcgtgagttattgcgtttggtcgattagattgttttttatagcggttgtattattttatatttttatttgttttgtgtgtggattatggtttgattttcgggtttttggttttgttgttattatttaggtcgtttttggtttgggtttagttttttagtttatttttgtttttagatttgtaggttattgtttggtttttattttagatgtttttttttgtgttataaaatttatttttgaggtttgttcgttttttgatttttttcgttttatgtatttgttttatatttttaatttttttttttttttaaattcgttttgttaggtattggtttttttttttgagttataagta

SEQ ID NO: 73 - DNA, 6283 bp, Artificial Sequence
  chemically treated genomic DNA (Homo sapiens)
taaatatgggggttattttttaaaaatttcgtttagttgtttagagaggtaggttatcggtttcggttagggttttatagtttgggttaaaatttttaattgttattttttttttttttgatatatataatgtaaaaggttttgttagatcgggtagttttagggttggggttgatataagttttttttttaatttatgaaaggtttgttgttgttgggatttttatttaaaaggttttcggttttttttttttttgtgattttatataaaggtttagttaatattgtaaagtttgggatttatagtttgtaaaattttatagtttttaagaatttttttatttgttttttggttttaggtttcggtagattataaatgatttgttttttttttgattttaggttgtatttttcgtcggatagtaaattttaagtaacgtatttgttgttggtagatttgagtttttttttttggatattttatatttatagttttttaggtgtcggagtagagtatttgtttttttggcgtattcgattgtcgtggggtgttttagtaaaaggttattaacgtattggagtaatacgtagtttaggtttttggtgggaaatttttggaggtttcgagttaatgttttttcgaagatggtgggggagtttttgaatttttggggaagttaggtttaagtgtattgagtagtgatatttgatttcggatttttttattgaaaggtaaatagtttttgttttttaggggttaatttgatgttaaagaaagcgttttttaggtttaagtaggtgaattagttgtttttagttggtagtaattttagtaatatgtacgggttaggtattgttggatgtaaagttattgtagtttgattaattaagcgtaaattttgtattagtttgtagtttttggttttaggtttgggaataggtaggaggggagtgttttatggagattgataaggaattataattttaaaggtttttaggtgtttgagatggatttggatatttttaagagtttttttggggattaggtattgtttttgtttaatcggttgggtttcgggtttaatttttataagtacgggggtttcgttgattgttaattttggaggttgtttttcgtttatatttttggttatcgtttagttagagttggttttattttttggttcggtttagttaataaaagtttttattttttttttcgggggatcgtaagggttataatgattttcgtttcgggtaattttagtagtaaagagtcgtgttttgtaaaagagatagtggtttttagtttgttaagtaagtttttttttaataagggtaagggataattaggtatgtataaaaattgatgaattattttatgtttttttatagtataagttcggggtaagtagaaagtttgttttgttgaaatttttatggtttcgatgatgttaatagtttttttggataagggggcgattgggtcggttattatcgaatgtttagtatcggtatttataagaaaattaatgtttttatttttaattgttattttgattataggttttttgggagtttttgagttcggttttttttagtttaataatttttttgttaggttgagtagggtttttttttttttgtttggagttttttgtttcgagttattttgttttttttttagttgagggtatttgtttttttaatgttttatttttttataataagtatattgattacgttgtaagttttgatagttaggttgagtttttttttcggggtttttttttttttgtttttttgtgggagatttttttaattgttgtagttaatagttcggtatttcgtcgggtttgacgtttattttttttgcggttttttttacggtttattgtatttttgtttataaatatttggttagttatttttaataattgtgatgtgtttatttttgtaaatttagtttgtttttgtagtttttttttaatgttttttgcgttttgattaattaaagttatgttaattatgcgttgatttttagggttatcgggattaaagggagtatatatgtgataggttttatatagtttttcgtagaattgtgttggattttttttttttttttgaatgattttagagaatttattaacgtttgtggttttttgggtttttttttaatttttttaagagagtttttttgtatcggtttagtttttgtatatttttttttttatttgggttttattgggggtcggttttcggtaattgggtttttatatatttttgggggttttggtaattagtcggtgtatgtttttttagttatttagttgttgtttggagtatttttcgttttttatttgtgttaaagaggaatatgagtaattggtggtaattagtttaagtggggttatgggtttggataatagtttggagtaaattaattagagtttgtggttttttagtataggacggggtattgtttttttagttgagaaggtcggtagaggtgaagggttggtatataaaaatacgttttttcgttatgtgtttatttttatttattttagtatatcgttgtttttttaagggtatttgtattttcgttttgggttttaaacgagttgttaagggaggggttttttttgaggttttatttttttttttgtttattttgggtggtttagggatatgtttgttttgcggaggtataagtattgtggatttaaaagtggggagtttttttttttggtaaggggagggtattattgggatgatttttgttattttttgtaatggatcgtttgatgttgggtcgaatagaattttaggagttgatttttttcggtgggtggagcgggatttttttttgattatttgtttttttgttattagtattgttgttgtttgtttttttatttattgtggtaattaagtgtttatgtatggaaattggtttgagtgttttgatttattagttattttgtgttatattttagaaataagggatttgtttaggtttttttttgatggttaatttatttttaatgttggttaatttattttatataaagttttaagtttttttggtgttatagtaattttatagtcgttattaaatttttttttaaaattttttaatatagtttttagaggagtaggtttattttgtgtttgattcgtgtttttttaagataaaatattaagtttatattaaacgtatattataaaataaagaatgggtaaaaagggtatatacgtatttttttagtttttattaaattagaattaaaattaaaattagagtatttagtaatttaagttaggttaaattaaaattaaagtgttaagtaatttaagttaagttaaaaataaaaattaaagtgttagtataggtacgtcgtgggtgattaggttatgtttttatttaaatggagtgggtaagtttcgaagattagttttattaagttttaaatgttcggattttaagtgtttgttttttttcggtgtttagttattgcgttgatattttacgggggtttgttacgtattgttttgattaggcgttttatcggggtaattgtttatttaggagcgttcgtaggattcgcgtcgtttaagttggcgggagtttttcgtagggatgttttatagggtaggtttaagttttttaaggggttgtttcgattgttcgttaattatttcgttttttagttagggaattaagaaatatagtaggatgagttatagataaaattttttagatattagattaaagtaggaagaggttttttattcggttaggagcgttggtagattcgcgttttgagagtcgagtttttcgaaaaagaaatttttagtttttttaagggtttataattttaaggggtttacgtgaaaaaattataatagattaagtaagcgtgggaaacgtgattgggggttatatatattagttaatagaataaaaagttttatagtgtttttttatataatgtttggaatttatagataatattaatagttttggttaggggttaataatattattattattttagttattagggttaggtggtggtgttaaggtcgtttagttatttattttatttttgtttttttttaattttttgttttttttttttttttttgttttataaattagggaaaaggggaggttggggagaaattgagaaggataataggagaagtggtgattttatattataattttagtattttgggaggtcgaggtgagagaatcgtttgaggttaagagttttttattagttttggtaatatagtgagattttatttttaaaaaaaaaataaaaataataaaaaaaataaaaaaaaaaattaaataaataaataaataaattagttgggcgttgtggcgggtatttgtagtttttagttatcgggaaggttgaggagggaggatcgttgtttgagtatagtaggtggaggttgtagtgagtagagatcgtattattgtatttttgtttgggggagagtgagatttagttttaaagaaaaagtaagaataaataaaagtggtttttggaataaatttggataaataatttttcgaatagaggtaaatttttttttttggagaagtcgtgttattggtaattttttagggggttagttcgggaaaagttagttgaaacgagaggacgtttatcgtttttcgtttcgatttatcggattttagaaggttatacgcggtaggcgtcgttcgggatttaggggtcggggtgagaacggaggcggagaaattttttaggtttcgttatcggggcggggaattgggaggcggtttcgtttttgggtatttttttgggttttgtttagcggcgggcgtatgtttagttatcgtgaggttgcgtttgttcggggttcgcgtttttttatttcggggatcgttttcgggtcgttcgttttatttggcgcgttattttcgcgtgtatggttttgttgtttcgagttttgagcgtcggcgcgggatcgagttggcggcgggcggcgcgcgtttttcgaggttttttgttgtttttgttcgagttcgcggtttttacgcgcgttttttttcgtgttatggtttgtaggtaggagtcgtagtcgtagggttcgtcgttcgttgttggcgtcgtggttttttatgattatttggtgatcgggggcggttcgggcgggttggttagcgcgcgtagggcggtcgagttgggtgttagggtcgtcgtggtggagagttataagttgggtggtatttgcgtgagtatcgtcggtttgttcgggcggggggcgtttttttgtttcggtttttcgggggatagtttgtgttcgtttttatggcgattttgtttttcggcgttgggttttttttttttttattttcgtaattttttatttcgaagttaggaatttagtaggtggaggagagagaggcgttcgggggtttttttgcggttcgtaaagtcgagttagcgtttgttttcgtacggatgcgatattgattagggtcggggcgggttagattaatttttttttatttttatttgtttaagtgggagaggattggattttgtttttgatcgcgtgaaatataaaattgtatttgggaatattgttggtggtttgtgtgtagggacgagggtgacggtgttatagattttggtttttgaaaaatgtagattttggttttttcgttttaagggtagaatgatttatagcggttgttgttaattttggttatatattcgaattatttgagggtgtttggattttcgatttaattggtttgaggtgtatttgggttttgggatgtttttcgatttaattggtttgaagtgtagtttgggttttgggattttcgggtgatttgaattgtagttaaggcgattttgagtaggtgagtttttagagtttttgttttgttttggttttatgtggattgtaaaattaaaaatagagggatgtaaattttgagatttataaaatttataatttttgaaaataagggtttttgtttgtgtttgttttttgagatagggttttgttttgttatttaggttagagtgtagtggttattatagtttattgtagtttcgaattttcgggtttaagggatttttttattttggttttttgagtagttggaattatagggggttaattattacgtttagttaattattattattttttgtagagatgggggtttcgttatgttgtttttgttgattttaattttttggatttaatcgattttttt

SEQ ID NO: 74 - DNA, 6283 bp, Artificial Sequence
  chemically treated genomic DNA (Homo sapiens)
gggaagatcggttgagtttaagaggttgaaattagtaagggtaatatagcgagatttttatttttataaaaaataataataattaattaggcgtggtgattagttttttgtagttttagttatttaggaggttaaggtgagaggattttttgagttcgggagttcgaggttgtagtgagttatgatggttattgtattttagtttaggtgatagggtaagattttgttttaaaaaataaatataaataaaaatttttatttttaaaaattatgaattttgtaaattttaggatttatatttttttgtttttagttttgtaatttatataaaattaagataaaataaaagttttgagaatttatttatttaaggtcgttttggttgtaatttagattattcgaaaattttaaagtttaggttgtattttagattaattaagtcgggaaatattttaaagtttaagtgtattttagattaattaagtcgggaatttaggtatttttaggtgattcgaatgtgtagttaaggttgataataatcgttataaattattttgtttttgaaacgggagaattaggatttatattttttaagaattaggatttatggtatcgttattttcgtttttatatataggttattagtaatgtttttagatgtagttttgtgttttacgcggttaagaatagaatttaatttttttttatttggataagtgaggatggaggaaggttaatttaattcgtttcggttttggttaatatcgtattcgtgcggaagtagacgttggttcggttttgcgggtcgtagagaagttttcggacgttttttttttttttatttgttgggtttttggtttcggaatggggagttgcgggggtggaaaagaggaaagtttagcgtcgggggataggatcgttataggaacgagtataggttgtttttcgaaagatcgagataaagaggcgtttttcgttcgaataaatcggcggtatttacgtaagtgttatttagtttgtggttttttattacggcggttttggtatttagttcggtcgttttgcgcgcgttggttagttcgttcgagtcgttttcgattattaggtagttataggaggttacggcgttagtagcgggcggcgggttttgcggttgcggtttttgtttgtaggttatggtacgggagagggcgcgcgtgagggtcgcgggttcgggtagaagtagtaggaagtttcggaaggcgcgcgtcgttcgtcgttagttcggtttcgcgtcggcgtttagggttcggggtagtagggttatgtacgcggaagtggcgcgttaagtggggcgggcggttcgggggcggttttcggggtaggggggcgcgggtttcgggtaagcgtagttttacggtgattaagtatgcgttcgtcgttaggtaagatttaggaggatgtttagaggcggggtcgttttttagtttttcgtttcggtggcggagtttgaggggttttttcgttttcgtttttatttcggtttttggatttcgagcggcgtttgtcgcgtgtagttttttgaagttcggtggatcgaggcgaggaacggtgaacgttttttcgttttagttggtttttttcgagttggttttttggggagttgttagtggtacggtttttttaggaagagaaatttgtttttattcgaagggttgtttgtttaggtttgttttagagattatttttgtttgtttttgttttttttttgagattgggttttatttttttttaggtaggggtgtagtgatgcgatttttgtttattgtagtttttatttattgtgtttaagtagcgattttttttttttagttttttcggtagttgggaattataggtgttcgttatagcgtttagttaatttatttatttatttatttaatttttttttttattttttttattatttttattttttttttagaaatagggttttattatgttattaggattggtagggaatttttggttttaagcgatttttttatttcggttttttaaaatgttaggattatggtatgaggttattattttttttgttgttttttttagtttttttttaatttttttttttttttagtttataagataggagaaaagggagaaagtaaaaagttggaaagaaatagaagtaagataaatagttagacgattttggtattattatttggttttggtggttaagataataataatattattaatttttgattaaaattattggtgttatttgtaaattttagatattgtatgagaaagtattgtaaaattttttgttttgttagttgatgtatatagtttttagttacgttttttacgtttatttgatttattatgatttttttacgtagattttttagagttgtaagtttttaaaagggttaggaatttttttttcggagagttcggtttttaagacgcgagtttgttaacgtttttggtcgaataaaaaatttttttttgttttaatttggtgtttgaggagttttgtttgtgatttattttgttatattttttggttttttgattgggaagcgaggtaattgacggatagtcgaggtagttttttagggggtttaggtttgttttgtggagtatttttgcggggaattttcgttagtttgagcgacgcggattttgcgagcgtttttgggtaggtaattgtttcggtggaacgtttagttagagtagtgcgtggtaggttttcgtggagtattaacgtagtggttgaatatcgggaaggaataggtatttggagttcggatatttgaaatttggtaagattggttttcggaatttgtttattttatttgagtggaagtatggtttgattatttacggcgtgtttgtattggtattttggtttttgtttttgatttgatttgaattgtttgatattttggttttggtttgatttggtttggattattggatattttgattttggttttgattttggtttggtgaaaattgaaaaagtgcgtgtgtgttttttttatttattttttgttttgtggtgtgcgtttggtgtgagtttggtgttttgttttgaggaaatacgggttagatataaaataagtttatttttttaggaattatgttgaaaaattttaagaagggatttaatggcgattatggggttattatgatattagggaaatttagaattttgtgtgaaatagattggttaatattagaagtgggttggttattagaaggaagtttggataggttttttgtttttaaggtatggtataaggtaattggtaagttaggatatttagattagtttttatatatagatatttggttattatagtgggtaagagggtaggtagtagtagtgttagtagtaaagggatagatagttaaggaaggatttcgttttatttatcgagggaaattaatttttgaagttttgttcgatttaatattagacgatttattgtaggagatggtaaaagttattttagtggtgttttttttttattagggagagaggttttttatttttgagtttatagtgtttgtgttttcgtaagataaatatatttttaggttatttagagtagataagagaggaggtgaagttttaggagaaattttttttttggtagttcgtttaagatttaaaacggggatataaatgtttttgagagagtagcggtatattggaatagatgaggatgggtatatggcggagaggcgtgtttttgtgtgttagttttttatttttgtcgatttttttaattggaaaaataatatttcgttttgtattgaaaagttataagttttaattgatttgttttaaattattatttagatttataattttatttgggttgattgttattagttgtttatgtttttttttaatatagatgaaaggcggagagtgttttaagtagtaattaagtggttaggggaatatgtatcggttgattattaaaatttttaagagtatgtaaggatttagttatcgggaatcgatttttagtgggatttaaatgaaagagaggatatgtaaaggttaaatcgatatagggaagtttttttagaaggattagaggggagtttagaaggttataaacgttaataagttttttgaggttatttagggaaaagaagaaagtttagtataattttacgagagattgtgtgaggtttattatatgtatattttttttgatttcgatagttttgaaaattaacgtatgattaatatggttttagttagttaaagcgtagaagatattagaagaaaattgtagaaataggttgggtttgtagggatgaatatattataattattagaaatagttaattaggtgtttgtaaatagggatgtagtaagtcgtaaggaaaatcgtagagagaatgaacgttaggttcggcgaaatgtcgagttgttagttgtagtaattagagggattttttataaaaaggtaagggaaggggggtttcgggaaagaaatttagtttggttgttagagtttgtagcgtaattagtgtgtttattgtaaagaaataggatattggaagaataaatgtttttagttaaaaggaaaataaggtgattcggagtaggaggttttagataaggaggaaggggttttgtttaatttggtagaagggttattggattgagggggatcgggtttaaggatttttaaagagtttatggttaggatgatagttgggggtaaagatattgatttttttatagatatcggtgttgaatattcggtagtaatcggtttagtcgtttttttatttaaaaagattattgatattatcggagttatgggagttttagtaaaataagttttttgtttgtttcggatttgtattgtaggaagatataaagtgatttattagtttttgtatatgtttgattattttttgtttttgttgagaagggatttgtttagtaaattgagagttattattttttttatagagtacggttttttgttgttaaagttattcggaacgggagttattatgatttttacggtttttcgagaggaggaatggagatttttgttaattgagtcgggttaagagataagattagttttggttaagcggtggttaagagtgtgggcggaagataatttttagggttggtagttaacgaagttttcgtatttatagaagttaagttcggggtttagtcggttaggtaaaaatagtatttggtttttagagaagtttttgaaggtatttaggtttattttaagtatttaagaatttttggaattatagttttttgttagtttttatggaatattttttttttgtttgtttttaagtttgggattaaggattataggttggtataggatttgcgtttggttaattaggttatagtgattttatatttaatagtatttaattcgtatatattgttggggttgttgttagttgaggatagttggtttatttgtttggatttgaaagacgttttttttagtattagattagtttttgagaggtagaagttgtttgttttttagtgggaagattcggagttaggtgttattatttagtatatttggatttggtttttttaagggtttaagaatttttttattattttcggggaggtattggttcgagatttttagaagttttttattagagatttaggttgcgtgttgttttagtacgttgatgattttttgttgggatattttacggtagtcgggtgcgttaagagaatagatgttttatttcggtatttggaggattgtgggtataaggtgtttaagaaaaaaagtttagatttgttaatagtaggtacgttatttgggatttattattcgacggggagtgtagtttgggattagaaagaaagtaggttatttgtaatttatcggagtttaagattagaaggtaggtgagagaatttttaggggttgtggggttttgtagattgtggattttaaattttgtagtattagttaagtttttgtatgaggttataaagggggaggggatcgggaattttttgaatggggattttagtaatagtaagttttttatgagttaaaggaaagatttatgttagttttagttttggggttattcgatttgataaagttttttatattgtatgtgttagagagagaaaagatggtagttgggagttttaatttaaattgtggggttttggtcgaggtcggtggtttatttttttaaataattagacggggtttttaaaggatggtttttatgtttg

SEQ ID NO: 75 - DNA, 9524 bp, Artificial Sequence
  chemically treated genomic DNA (Homo sapiens)
ggtataaggagtttttgtggatatagtatttggttgacggatggggtttatggtaacgggtaatatagattatgttttgttgtaatttttagaaaaattgtggaagtgaagatagtttaaatgagaataagtaaaaggtgtttatatagagtttgttatagaaaggaagttagtcgttattttttgtatttattagagatttagaggtaggtaggaaagtttgagagatttatggtagaaaaagttatgttttgattgttggtttagggatgttgtaagttggttaattagaagtgtggatttttatgggattagttagagatttatattttgttttttgtggttggttataaattgaaaatagaggtaaaaattagggaagttggtagttattggttaatgttggtgtatttgattgttgtaagggttatgatagaagttgtttagtttataagggtattaagagtttagagggttttttagtagtttggttgtaataataaaatattatagattgggtagtttaaagaatagatgtttttattttatagttttgtaggttgggaagtataagattaatgtgttagtagattttatatttagggagtatttgttttttggattatagatagttaatttttggttatgtttttatatggtaaatatgttaagggagttttttgagaatttttttataaggggattaatgttatttatgaaagttttatttttatgatttgattattttttgaaatttttatttattaatggtttgaaagaatatattttttagggattttttttaaagatttgggggttaggattttaatatatgaatttttgggaaatataaatatttagtttataatataaggtaatagaaaaataaaatagtatttgtgtatttttggggtattgatttttatttttaagaagttttttttgatgttaatggagtatttgatttttaaggtatggtataaaaatagattgtgaataagaattttacgagttttattaaatagtttgtgatatgtgtatttgaataatgtatattataatatagtattgaagttgttttgtttgtgtattaagttattatttatacgtttgtatgtatatatagtttgaaaatgtattgttaaattattattttaaattagtgttgttatatgttttttttttttattatttatgatgttaatgtgttgagatattttaataaatattatatattatttaaaaattttattattaaaaatgtatagatttggtgtagtttaaagaaatgttttatgaatatatatatattaaggatttaaagagtaaagttaattttttatttttgatttattacgtgttagttattttatttttgtttgttttatttaaatatattattattattattattattattattattattattattattgtgtattttaaagtaagttgtagatatttttgtagtttattttgggatatagtggtatgtagattataatatagttaaagtagtaagaattattattgtaagaaagaggatgaattaaagtttatttaggtttattttagattttagagtaggaaatgaggagggtagatgaggagaaatgaggattttgaaatagtttattcgtgggagaagagtgttgttatgaaggtggagtcgttgtttaagagagattggagagagagtgtgtagagttattgaatattagggttgtatattgtagggtttggggtagataggatatgttgtagtaggggaaaagtttttggtttatgtggaagatgtaagttgggtgggtgttgtggatgttatagtgatgtggaatgagaggagaaaatgggagtttgggttttaaataaggagtaagtagagttatattttttatttttttattgaattaggtaatatggagaaagatttggatttttgtatttgtttagtaaggaagtagaggtgggagagggagagttagtttggataaatttagggagaagtagaggttttagttttattgtatatgtgtttttgatttgttttttttgattttttaggtgttgaagagttatggataagattatttcgttggttataagttgagtcgggttgatatttatttggttaaatttttttattacgtggaagagtttgatattagttttatttttaatttttttttgttgaaggtgatttattttttagtttttaagaggtagttttttattttttattttgggatttagtatttgggtttttgaattggttatattttgattttagttttttttaggtttttagggttttttaggtttttaaaatgagtttttaggttttgattttgaggtatggaaatgtttttttgttatgttaaggaaattatatgtgtatgttattttaagaatatttcgttttttataatgttaaggatttaggatttagtatttttttttatttttttattttattgtggtttttgtttttgagttttttgtgatgttttttattttaatatgtttttatttttttatattaagtgtgtttgagtagggttttttttatttggttttttttttatgttttggtttttgttgttagataattgagttttttgtgtatagtttttttaatacgttgtttttgaaagttatatttttttatgggaaaaagtggttttatggtttgattttaatattttttatttttatttttagtttaatttttttatatttttattttttttgtttagagattgatttgtgttattttataggtatattgtttttttttattttttataagagttatgaatttataagatttatgtgtaaggaagagggtaggaagattgaattgaataaagttttaaagatattttttgggaaaatgttagtgagttgtatgtttttttttttatttttattttttacgtagtgtttttttttgtttttttattggtgttgatagagggaatttagttggtttttgtgtaggaggggcgtagattttttgggttgtgttaatggtggtgttagtttttggttttattttgaggttgtgttttgtgtattgcgggttttgaaaattagaattagtaaattttttatagtgaagaagtttttgtagtttggtagtttgagggagttttttataaatgcgaaaggtttagaagaagtaataaagatttttaaggtttgataaaataggtatggatgttaagaatatgtaatattaatattttaaagttttgtaataataaattgttttatttaaatgttggttgtggttattgtgaagttaataaattttttaaaaattatgtgttaattatatagtaaaatgtttatgattagatttagttaaaattgatttttttttattagtatttgatatgaaattagatttttaaattttttataaatttttttggaattaaaaatttagtaaaaaagtaaaatgtagattatgtggtttgtttgatttttttaagaattgttttgtaatatttgttaaatggtttattagaaagttatgtatagaaatttatttttgatattttgtataagaaaatagttattattttggggaatggtaaaatgaaatttttttttttttttgatatttattttattttttatgaaaatatttttttttatgtatttttaaataatttttttgtttgttatggattttttagttttgtaaggggtgaggaaatattgaagagtaaatagatttattttttgtttttaggttaatttgttattttttatagtgtatgtgtttttggtttatttttattttttttaaggttttgtggggattcgggtataagtttttttttagtttttttagtgttatttaggtttggttgcgaagatatagatggtatatgcgaattatatataagtaattatatgtaaaattatttttttttggtgtgttattgtgttagcgtgtttggattagaagtgatttttaggaatttttttttgcgttttttagtttttgggggtttttggtttttttggatttttatggattatgattatattattttaatttttgtttttgtgttttagtattttattttttgtgtgttgtgtttttttttttttttgttgtgaggataattgttattggatttggggtttatttagatatattaagatgattttattttaaatttttttattttattatatttgtaaagagtttttttttaaataagattaagtttataggatttagggatttttatatggatttattttttttgggggttaatataattttttatatggtataggtgaaataagattatttgtaattgatgaatttaggtgatgaatatttttagatttgttatattatgggtaatttgagtgacgtaaagaggatagtatatgtaaatagggtttttggatttgttagataaaatataggatatttatttaaatgtgaattttagataaataataaataatattttagtataatttggttttatatcgtgtttggaatatagttataattaaaaaattgttgattgtttgtttgaaatttatatttatatggatgttttatattttatttggtaatttagtaagaaaacggtggtattagtttgttttttatagatatttttttttagttatgtttataatagagattttttagttgttttagtttttgtatttaatttatgaaaaaaagtatttttaaaaagttagtttttgttgatttgtaaaaagagtaaaatttcggtgaaatgtattgtgtaaattttgattgttaattttgaaaaggaatatattaattagtgttttttgataagtagattatttgttttatgttttagaatttagtaggtggttttttggttatgaaatgtgtgggagtggtttttttttaatttgattttttttttagtgggagagaattattgagaggaataaagagtttataaatatattaggatttggaatttagttgtcgagttaggacggtgatagcgtttaataaagtaagtattgattttataaatttttttatattgttttatatttttttttttagttttttagaaaaatatgttaatatgtgtttttagtataaggaaaagtttgtttttatttatattgtgtcgttttggtgtgtttgggtgatagtttaagaattgtttattttttttttgttggatatatttttatagaattgtaaaaatgaagaatttagaaaattagggttttagtatttaatggtatgggaaataatgatatgaagagaaaaaagaaatggtagtattttaaataatttgagaataattagtgttggaagaagtggtaatgtatgtaaaaatttatttttttgtgtaagtagttaatatataattgtaaattgtgatattgtaattttatattggttgtgaaaatataaaatttaggtttagtataattagaataaattagtttgaatgttaggagaattagattttagttgagtttttgttattaattagtttaaagataagttatattttgtttttggagttttattaatttatggttaatatagaggatagttaagaaagaggtttcgattgttgttgttttttaaattgtgtaattttttgaatggagatttgttttgtttattttaggatgtttttaggtatttttggtttttatttatttgatttgtaatttttttttttttttcgtagatatgataatttaaaatgtttttagattttgtttaatgttttttggagtagaggagtaaaatttttttggttgagaattatgggattatatgattttatggggttaagtaaggttgtgttattgatgtgttttattgtttggatatttattgaaaattttttgttaatttaggtggattgattagtgaatattaatattttttgtataggagttaaaaaggaaagagagagagaaatagagagttattatatgatagatttgatataagtttggatttatataaaattttatttttattcgagttttatgaataaaatatagagaattagagaaatggatataagatagataatagatgatgaagagatagattataaagagatagatatatagaacgattgatagataaaataatatatatatggatgggtagatagagattataaatagatatatatatatagattgttggttagtaaaataattgatggatagatagattaaagaaagaggatttatgggttatttaatatgtttagagatttatttattttttaagtattgggataagagtaaatatttattgttgtgtttttattatgaattttttgtatattattttatttaatttttttaataatttttaaaagtagaaataattatttttattttaagaagagaaaattgaggtttagagattaaataatttattgtatttatgaattttataatggaaggagttatagtttattttatttttttttttttttgataagaaatagtgttattgggattattttagagatgtaaatgtaatttttttaatttatttttggaattatgagagtttatattttttttaaaataagtttattttttaattgatgtaagttaattattgatgtaaagtaattatattagtttttaatttattttgatttttaggttgttaaattagagaaagttatagttttattaatttttttttttaagtaagtttttgaaaagttgttaataggaggaatttaggaattagatgtttttttttcgttttttttttttaatatttatttggttaatatatatttaataggaaaatataaaataattttttagataggagttgagagttaggttatgaggtggagtggaaaagttttggatttgtaattagaagttaaggttgatttaatatttattaagtgtgtagtatgagataggtgttttagttttttgaaatttagtgtgtttatttttaatttggataataggagttattttttagggttgttgcggaaggtaaatatattttttagatattgattatgaatgaggagtatgtgtgtgtgatttatggtaaatttttgagttttttggtttttattttttgttgatttaataaagtttaatggtaatttatgttttagttttagtttgatttttggaaattttatattgagaaagtgatatgttagttattagtaggagtgttgtgataaaatattatgtaagataaaattttatttttttttgaaatatgatttttaattaatggttaagagagtttagtttggggattggaattataatattgtgaattttagtcgataataattaaataagtatattttatgtttttatttgaattttatttttttttttattttgttaaattatgttatttttattttttaagttattttaaattgtttttggagttattatagaaagtataatgttaaaatattttatgataaaataggtgagttgatttagtatgattttaaagaattttttattttttaaaggttaattattgatttttatattttaaaatgagatatttaaaagattttgatgtttaattttagttatatatatttttttagaaatatattagttgaggtcgggtgtagtggtttatttttgtaattttagtatttcgggaggttgaggcgagtggattatttgaggttaggcgttttagattagattgtttaatatgttgaaattttgtttttattaaaaatataaaattattcgggtgtggtggtatatgtttgtaattttagttatttaggaggttgagggaggagaattattagaatttgggaagttgagtttgtagtgagttaagattacgttattgttttttagtttgggtaaaaatagtgaaattttattttaaaattaataataaataaataaatatattagttgttaaaggtaagtatatttttgttttatatttaataattataaaattttgtaagaagaattttaatgttaaatattagagttgggggtttggagagaaaacgtaattgtttttaagttttggtattggaatttttgtttttaatgagttttgtgtttttttatttatatttatgatataattagttgtatttgtttttgtagttattggtttttattttttgatattttgttatgttttattttttaaatagtttgggatagagtaagggttattaaattttattgatgagtttagttaatttttttttaattatttataatgagtaagtgagtatgtatacgtgtaaatattcgtatatataatatataaataattgaaattaataatttattaaatattatttattttttaatatgttatgtttattgatattttttatttttttttattttatttttaaaagtaatgggtttttataatttattgaaagattattatgtatattttagaaatattaatatagaaaataagatttagtttttggtttttaatagtagtgagtttgtatttcgatttattatttattttgagaaagttattttaaaaattttagtatttttaaatgtaaaatgagaataataattgtatttattttaggtgatttttgtaggataaaacgaagagaagtttagaagaatgattagtgtgtaattgatgttgaataaatgttagttttttttatattgtaaaattaatgtagtaatatttttttttttagtttataaaataaaatgtattttatagagttagaatatagaattataaaagttgtagggattaataatttttgtttgttgatagattttggattttttagttatagttaaataagtttgaggtttaatttttggttttgattaaatgtagttttatagttaaagaggtgaagagtgatttagttttttgtcggttttttttgttagtgatattttttggttttatggttagtttatgggtttttagggtttttatttagttggtttttaggagtgattttattttagtttttggtgtagatatttatgtttattattaatcggagtgtgattgtgaatattgtatttttttgatgttttattttattaattaaaaaattgagataataattattttacgggattataaggagggttaaagatataaaatattgaaagggattagtattgaggaaggattattaggaagtttttaataaatattagtttttgaatttttttttttttaataatttttatatatgtatttttattatatatttttattttttatgttgttaagaaaagttatagttagttaatgaagatttgagattggtttgttggaatttgagggtggttattgttgggtaataatttgagttaagaaaatattttaggaatttttttaatatagttatgaagaaggaaggtttttttttagtattgttggtggtttttaattatatattttaaagtatatttttgattttatcgttttaattatttatttatttatttatttatttagg

SEQ ID NO: 76 - DNA, 9524 bp, Artificial Sequence
  chemically treated genomic DNA (Homo sapiens)
tttgaatgaatgaatgaatgaatgaataattgaaacgatagaattaaaaatgtattttaggatatgtagttgaaaattattaataatattgaagaagaattttttttttttatgattgtgttggaggagtttttggaatgtttttttggtttaaattgttatttagtagtggttatttttagattttagtaaattagttttaagtttttattggttaattgtgattttttttggtagtataagaggtgagagtatgtggtaaaaatatatgtataggagttattggaagaggaagaatttaagaattaatatttattgaaaattttttagtgatttttttttaatgttagttttttttaatattttatatttttaattttttttatagtttcgtgaaatgattgttattttaattttttagttaatgaaatggaatattagagaaatataatgtttatagttatatttcggttggtgatggatatgaatatttatattaaggattaaaatgaagttatttttggaagttagttgggtgaaggttttgggaatttatgaattggttatgaaattagaggatgttattgatagggaggatcggtagggagttaagttattttttatttttttgattgtgagattatatttgattaaaattagaaattaggttttagatttgtttaattgtagttagaagatttaaaatttattaatagatagagattgttaatttttgtagtttttgtaattttgtattttaattttatggggtgtattttgttttataagttggaagaagagatgttgttgtattaattttgtaatatggaaggagttagtatttgtttaatattagttatatattggttatttttttaaattttttttcgttttattttataaaaattatttaagatgaatgtagttgttatttttattttatatttgaggatattgaggtttttaaagtaatttttttagagtaaatgatggatcgggatgtagatttattgttgttaaaaattaaggattgagttttattttttatgttagtgtttttgaaatatgtatggtaattttttagtagattgtgaaagtttattatttttaaaaataaaatagaaaagaatagaaaatgttagtgagtatgatatgttgaaaggtaagtaatgtttgatgagttgttagttttagttatttgtatattgtgtgtacggatgtttgtacgtgtgtatgtttatttgtttattgtaaatggttagagagaaattgattgggtttattagtgaagtttgatagtttttgttttattttaggttgtttgggaggtggaatatagtagagtattagagaatgaaaattagtggttgtagggatagatgtaattaattgtattatgaatgtgaatggaagggtataggatttattgaaagtaggagttttagtgttaagatttaggaatagttgcgttttttttttaaatttttagttttgatatttaatattaagattttttttgtaaagttttgtggttgttgagtgtggaataaaaatatatttgtttttaataattaatgtatttatttatttattattaattttgagatggagttttattgtttttgtttaggttggagagtaatggcgtgattttggtttattgtaaatttagttttttaggttttagtgattttttttttttagttttttgagtagttgggattataggtatgtgttattatattcggataattttgtatttttagtggagatagggttttagtatgttggatagtttggtttggaacgtttgattttaggtgatttattcgttttagtttttcgaagtgttgggattataggagtgagttattgtattcggttttaattaatgtatttttaaaaaggtatgtatgattaaaattaggtattaaaattttttaaatgttttattttaaaatatgggagttaataattaatttttggaaagtaaagaattttttgaaattatattgaattaatttatttgttttgttatgagatattttgatattgtattttttatgataattttaggagtaatttaaagtaatttgggaaatggaaatagtataatttgatagagtgaaagggagagtgaagtttagatgaaagtatggggtatgtttgtttaattgttatcgattagagtttatagtgttgtaattttaatttttaaattaaatttttttagttattgattgaggattatgttttaaaaggaagtgaaattttattttatataatattttattataatatttttgttgataattagtatattatttttttaatgtgaggtttttaagggttaggttaagattgagatataggttattattgagttttgttgggttaatagaaaatgagaattagagagtttaaggatttgttatgggttatatatatatgttttttatttatagttaatatttagggagtgtgtttatttttcgtaataattttgggaaatggtttttattatttaaattaaagatgggtatattgagttttagagagttaaagtatttgttttatgttgtatatttggtgagtgttgggttagttttaatttttgattgtaggtttagagtttttttattttattttataatttggtttttagtttttgtttgagaagttgttttgtatttttttattaaatatatattagttaaataaatgttggaaggagaggacgagaggggaatatttaatttttgagttttttttgttagtaattttttaggggtttgtttggaagaaaaaattgataaaattgtgattttttttgatttgataatttaaaaattagagtgagttgaggattagtataattattttatattaataattaatttatattaattaaaaaatgggtttgttttgaaaggaatataagtttttataattttaggagtaaattaaaggagttatatttatatttttgaggtggttttaatgatattgttttttattagagagaagggagaatgagataaattatgattttttttattatgagatttataaatgtagtaggttgtttaatttttgagttttaattttttttttttagaatagagatagttatttttatttttgagggttgttgagaaagttaaatgagataatgtataaaaaatttatagtaggaatatagtaatgggtgtttgtttttgttttagtgtttggaagatgggtgagtttttggatatattgagtagtttatggattttttttttttgatttatttatttattaattattttattgattaataatttatgtatatgtatttatttataatttttgtttatttatttatgtatgtattattttatttattaatcgttttatgtatttatttttttgtaatttgtttttttattatttattatttgttttgtatttatttttttggttttttatattttgtttatagaattcgagtaggaataagattttatatgaatttagatttatattaaatttgttatatgatggttttttgttttttttttttttttttttttagtttttgtatagaagatattgatatttattaattagtttatttggattaataggaaatttttagtgaatgtttaagtagtggggtatattagtaatatagttttgtttagttttatgaggttatgtagttttatggtttttaattagggggattttgtttttttgttttagaggatattgagtaaggtttagagatattttgggttgttatatttgcggggagggaaagggggttataaattagataggtagaggttagggatgtttagaaatattttagagtgagtaggatagatttttatttaaagaattatatagtttaaagggtagtaatagtcggagttttttttttagttattttttatattggttatgagttggtagaattttagagatagaatatgatttgtttttgagttaattagtggtaaaggtttaattagaatttagtttttttgatatttaaattaatttattttaattatattaaatttgagttttgtatttttatagttaatatagaattatagtgttataatttataattgtgtgttgattatttatatagagaaataaatttttgtatatattgttattttttttagtattgattatttttagattgtttaaaatgttattattttttttttttttttatgttattgttttttatattattaaatgttgaagttttggttttttaaattttttatttttataattttgtaaagatgtatttaatagaaaagaaataaataatttttgaattgttatttaagtatattaagacggtataatatgagtaaaaatagatttttttttgtgttaaggatatatattagtatatttttttaggaggttagagaggagggtgtgaggtaatgtagagaaatttataagattagtatttattttgttaaacgttgttatcgttttggttcgataattgaattttaggttttaatgtatttataagttttttgttttttttaatagtttttttttattgaaagaagagttaagttagggaaaagttatttttatatattttatggttaaggggttatttattggattttaagatatgaggtaagtgatttgtttattagaagatattggttaatgtgtttttttttaaggttggtaattaaagtttatataatatattttatcgagattttgttttttttgtaagttagtagaaattggttttttaaagatgtttttttttatgagttgggtgtaaagattagggtaattgaaaaatttttattgtgagtatagttgggagaggatgtttgtgaagggtaagttgatgttatcgtttttttattgggttgttaaataaaatataggatatttatgtaaatgtgaattttaggtaaataattaataattttttagttatagttatgttttaaatacggtatgaaattagattatattgaaatattatttattgtttatttgaaatttatatttaggtgggtattttgtattttatttgataaatttagagattttatttgtatatgttattttttttgcgttatttaaattgtttataatataataaatttgaaagtatttattatttggatttattaattgtaaataattttattttatttatattatgtagggggttatgttggtttttaagaaagataggtttatatagaaatttttagattttgtgaatttgattttatttggaaaaaggttttttgtagatgtaatgaagtaaaagaatttgagatgagattattttggtatatttggataggttttaaatttaatgataattgtttttatagtagagagaagagaagatataatatatagggggtgaggtgttggaatatagaggtagaaattagagtgatgtggttatgatttatgaaagtttagaaaggttaagagtttttagaagttagaagacgtagggaaggatttttggaaattatttttaatttaaatacgttggtataatgatatattagggaaaaataattttgtatatagttatttatatgtaattcgtatatattatttgtattttcgtagttaggtttgagtggtattgaaggaattgagggaaggtttatgttcgggtttttatagagttttgaggagagtgaggatgagttaggagtatatgtattgtaagggatgataagttggtttgagagtagagggtgggtttgtttgttttttaatatttttttattttttataaaattgagggatttatagtagatagaaaggttgtttgaaaatgtataagaaaaagtgtttttatgagaaataaaatggatgttaaggaaaaaagaaaattttattttgttattttttagaatgataattgtttttttgtgtagaatgttagaagtaaatttttatatatgattttttgataggttatttgataaatgttgtaggataatttttgaaaaagttaaataaattatatagtttatattttatttttttattaaatttttaattttaagaaaatttatggggagtttggaaatttgattttatattagatattaatgaaaagaaattaattttaattaaatttggttataggtattttattatgtaattagtatataatttttaaaaagtttattaattttataatagttataattaatatttagataaagtaatttattgttgtaaaattttagaatattggtattgtatgtttttggtatttatgtttgttttattaaattttgaaaatttttgttgttttttttaaatttttcgtatttatgggaagtttttttaggttgttaggttgtaaaaatttttttattgtggggagtttgttgattttgatttttagggttcgtaatgtataaagtatagttttagagtgaagttaagggttaatattattattaatataatttagggaatttgcgttttttttatataaagattaattaagttttttttattagtattagtagggaggtagaaagagatattacgtgagaaatgaagataagaggaagaatatgtagtttattagtatttttttaaaaaatgtttttaagattttatttagtttagtttttttatttttttttttatatatgaattttgtagatttatggtttttgtagaagatgagaaagaataatgtgtttgtgagatagtatagattagtttttaagtagaagaagtgaagatatgggaaaattgagttagaaatgaaaatagaaaatgttaaagttaaattatgggattatttttttttatagagagatatagtttttaggggtagcgtgttgggagagttgtgtataaggaatttagttatttgatagtaagagttagagtataaggaaggaattagatggaaagggttttgtttagatatatttggtgtgggaagataagggtatattgggataaagggtattatagagaatttaggaatagaaattatagtgaaataaagggatgaggagagatgttgagttttgggtttttggtattataaaaagcgaaatatttttggggtagtatgtatatgtaatttttttggtataataagaaggtatttttatgttttagaattaggatttggaagtttattttggagatttggggggttttgaagatttggagaaggttgaggttagaatgtggttagtttaaggatttagatattagattttaagatgggagatgaggagttgttttttgaggattgggaaatgggttatttttagtagagggaagttggagatgaggttggtgttaagtttttttacgtggtagagaagtttgattaggtgaatgttagttcggtttagtttgtggttaacgaggtagttttgtttatggttttttaatatttggagaattagaggaaatagattaggaatatatgtgtagtgaggttggggtttttgtttttttttgagtttgtttaggttgatttttttttttttatttttgtttttttattgggtaggtgtaaagatttagatttttttttatgttatttgatttagtgagagagtaagaagtgtggttttgtttattttttgtttggagtttaggtttttattttttttttttattttatattattatggtatttatagtatttatttagtttgtattttttatatgggttaggggttttttttttgttgtagtatgttttgtttgttttaggttttatagtgtgtagttttgatgtttagtggttttatatattttttttttagttttttttgggtagcgattttatttttatgatagtattttttttttacgagtagattattttagaatttttatttttttttatttgttttttttattttttgttttgggatttgaaataagtttgggtgaattttaatttatttttttttttgtaatggtggtttttattgttttgattatgttataatttgtatgttattgtgttttagggtgaattgtaaagatgtttgtaatttattttgaaatgtataataataataataataataataataataataataataataatgtgtttgagtgaggtaaataggggtggagtgattgatacgtgataaattaaagataaaaggttaattttgttttttagatttttggtgtatatatgtttataaaatatttttttggattatattagatttatatatttttaataataaagtttttgagtgatatatgatatttattaaaatattttagtatattgatattataaataataaaaagagaaaatatatggtaatattgatttaagataatagtttgataatatatttttagattatgtatatatataaacgtatggataatgatttggtatataaataaaataattttaatgttatattgtaatatatattgtttaaatgtatatattataggttatttggtagaattcgtagaatttttatttatagtttatttttatattatgttttgggagttaggtgttttattaatattaaggaaagttttttggaagtgaaggttaatgttttaaaaatatataggtattattttatttttttgttgttttgtgttatggattgaatgtttatgttttttaaaaatttatatgttgagattttgatttttaaatttttagaagagatttttaaaaaatatatttttttaagttattagtaggtgggggttttaggagatgattaagttatgggggtggagtttttatgaatgatattagtttttttataaaagggtttttagagaatttttttggtatgtttgttatgtgaggatatagttagagattggttgtttatgatttaaggaataggtgttttttagatgtgaaatttgttggtatattgattttgtattttttagtttgtagagttgtgagatagaaatatttgttttttaagttatttagtttatggtattttgttattgtagttaaattgttaagaaattttttaaatttttagtgtttttatagattaaatagtttttattatgatttttataatagttaaatatattagtattggttaataattgttagtttttttaatttttgtttttatttttaatttatgattaattatagaaagtaaaatatggatttttgattaattttatagaaatttatatttttagttagttagtttatagtatttttaggttagtaattaggatataattttttttattatgaattttttagatttttttgtttatttttgaatttttgataaatgtaaaagatggcggttgattttttttttatagtaagttttgtataaatattttttgtttatttttatttggattgtttttatttttatagtttttttggaagttgtaataagatatggtttatgttgttcgttgttatggattttattcgttaattaggtgttgtatttataaaggttttttgtgtt

SEQ ID NO: 77 - DNA, 7108 bp, Artificial Sequence
  chemically treated genomic DNA (Homo sapiens)
aaaaaagatattgattgaaaaattggtgaaatttaagtaaggtttggagtttagttaatagtgtattaatattaaatttttggatttaattattgtattatggttatataagatgttaatattagcggatgttgggtgaggggtatttgggaaatttgtattagttttgtaatttttttgttatataaataatttttttatttataagtttaaaagatatagattagattatagaggaaaaaaattaagtttgagatttgttttaaatattgttaataatttttgaagtaaggtgatgggtatattaaggttttgtagtgttttttttagatttatgtatattagataattttttttagaaaagtagaaattatatatacgtgtattaagttttttttatgtttaggtattgtggttagttacggggatttggttaattattaggatttgaggttttgttttaaggagtttatatttaatagggggaaagtagatatgatgtacggaatgtagaaagagtgatgtgatagaggaagtataggatgttttggagtaggggagaaaagagtgttttaaataggagaaatagtatgtagagttttgggttagggagaaaggttaattggtaagttatagagaaaaatttgtaaatgatttcggggaatgtagttgaggttttttgtttgtttagggtaaggataatttagttagattttttgggtttataaaattttgtgatattatttgtaatttagtttttttaaataaatttagaaggtaatttttttatgttttttattaagtttttttttttgatattttttatgatttttttatgatattttttttttttttttataatgtttttttatttgttataaatttgtagtttatttaataagattttttttaagtagtgtttataggatatttggtttttagtgattttttgaggtagttaaatagatatgaaatttttttgtgtatttatggatagttttgaaattaattgttgttattttttttttagtagattatggaattttggagattaaagtggtgtgggagtggttgtttttaattagattttattttttttagaaggtaggagttgttatagtattaaaatagttaatatatatattaggaggtggttttgagaagttgagcggagatcggttagattttatttaagttagtattgattttaaatatttttataaatgtttttatgtttattttattaagaaaaataaatttaaatgtgttagtttgtgtgagtattttatgtttttgttgtttttttgtgtgtttaggagataatttaagtattgtttgttagtttttgaaggataggtcggtaaagaaaaataatatttaataatttagaaaataagggtaaagaatttgatgatatgagaaaagtaagagtggtattattgtgggtaatttgaaaatataattatattagtgttaggttatatgttaaaggttgtttatggaaaagttgtttattaaaaatatgtattcgtgtgatttatttttgtgatttataggagttaatatataattatattagatttaaagttggtagggttatatatttgggagtattatttgattaatgaaaagaaaatatatttggatggtcgtatttttttagagttggtatttttaaatgggaaattaattattaatgtttgataattaggatttaaatttatatttttattattgattttatatagattagtttattgtttatataagtgattttgtgattgagtattaagtagtatgttatttttttttttttttttttttttttttttttttttttttttgttttttttgtttttttttttttttttttttttttttttttttttttgtttttttttttttttttttttttttgttcgaagtatttgggattaaagggtgagtagggtttaaagttttaaaattgtaagtgaatttaaatatataggatttttagggtagtaggtaagtagatttaagaataataataatttttttttaagttgttatattttttgtttaatagaatatgtatattttttttatatgtaagttttttttatttgttaaatgaaatattattttgggttattttgttaaagtatttatttaattaaaaaaaaatattttttgtgtagttacgatgtttttattatgtgggagagtttggttgttttgataattttttttaaatagtagattggtgggttttataattaggattggttattttattgttataattttagtttggttttttttatgttttttgtttgttttgagatagttttattttgttatttaggttggaatgtagtgatgtggttatgttttattgtagttttaatattttgggtttaagtgatttttttgttttagttttttgggtatttgggattataggtgtgggatattaattttggttaattttttttttaaatagagattttatttaattgtttaggttagttttgaatttttgagtttaagtaattttttttttttagtttttcgaagtgttgggattataagtatgagttattatgtttagttttagtttgttttttaattattttatgttattgtagtttaaaatagtgagcgttataggtaaatggtaaaaaaaaaaaaaaaaagattgtttttgagatatttagttatgttatattttataaagtacggattgaattttgagtaatgtattatattgtgtttaaagattatgataatttttttgtttttcgggagtttatagtttgaggggtgggggatataaaaatggtaattttttttttttttaatttatttatttattattattatattttaagttgtagggtatatgtgtataatgtgtaggttcgttatatatgtatatatgtgttatgttggtgtgttgtatttattaatttattatttagtattaggtatattttttaatgttattttttttttttttttttattttataatagtttttagagtgtgatatttttttttttgtgtttaagtgtttttattgtttaatttttatttatgagtgagaatatgcggtgtttggtttttttgtttttgcgatagtttgttgagaatgatagtttttagttttatttatgtttttataaaggatatgaatttattattttttatggttgtatagtattttatggtgtatatgtgttatatttttttaatttagtttgttattgttggatatttgggttggttttaagtttttgttattgtgaatagtgttataataaatatacgtgtgtatgtgtttttatagtagtatgatttatagttttttcggtatatatttagtaatgggatggttgggttaaatggtatttttagttttagatttttgaggaatcgttatattgatttttataatggttgaattagtttatagttttattaatagtgtaaaagtgtttttatttttttatattttttttagtatttgttgttttttgattttttaatgattgttattttaattggtgtgagatggtattttattgtggttttgatttgtatttttttgatggttagtgatggtgagtatttttttatgttataaatgtttttaatggttgtataaatgtttttttttgagaagtgtttgtttatgtttttcgtttattttttgatggggttgtttgttttttttttgtaaatttgtttgagtttattgtagattttggatattagttttttgttagataagtaggttgcgaaaatttttttttattttgtaggttgtttgtttattttgatggtagttttttttgttgtgtagaagttttttagtttaattagattttatttgttaattttggtttttgttgttattgtttttggtgttttagatatgaagtttttgtttatgtttatgttttgagtggtattgtttaggtttttttttagggtttttatggttttaggtttaacgtttaagtttttaatttattttgaattgatttttgtataaggtgtaaggaagggatttagttttagttttttatatatggttagttagtttttttagtattatttattaaatagggaattttttttttattgtttgtttttgttaggtttgttaaagattagatagttgtagatatgcggcgttatttttaagggttttgttttgttttattgatttatatttttgttttggtattagtattatgttgttttggttattgtagttttgtagtatagtttgaagtgagatagtgtgatgtttttagttttgtttttttggtttaggattgatttgatgatgcgggtttttttttgttttatatgaattttaaagaagttttttttaattttgtgaagaaagttattggtagttaaaaatggtaacgtttgtaggttgtaaatagttaataatgaggtataataggaagaaattagtttgaatgttagaagatttaggttttaatttagattttgatattaattagttagttggtaaattgtatatattttttttggggtttaatatatttattataaatttggaggaagggttagttagattttttttagtttaataatttgggaatttttgaggggagaattagatatattaatagaatatatagtttttataaggtatatgaagttattaattaggttggaatataatgtaagttagtagtgtttggaataattattaatataaaaataaataaatgaaaataaaggttttatataggaaagttttagaattttagagggattttgtgaagttatattggtgttggatttgtttagtgtaaatagaatttagaggtggaaataattttgttatgaggaaggaagatatttttgttgtttaattatttatatattagcgtgtattttgtttttttagatttatttatttatttatttatgtatttatttatttattttagagaaattaagagattgttattatggtagggaagtttaagttttattattttaatggacggggtagaatggagtttattcggtggtttttggttgtagttggagtggaggtatgttttaagttaggttattttaagttggatttaattgattgtattaaaatattttagtaagttaagagatttttatattagatgatttgtgaatattttggttttaaataaaagtatttttagttatttttttaaaatggataaattttattaaatgaaaatttaaaaatttgtttattaaagagtatatgaaaaagaatatatgaataattaaaatatattttgaaaagaattaattaattataatgagtggattttatttgtattaggatttaaataaattataaaatataatttatgatatataaaaattagaaatttgaatattgattgaatgttagataatattaaagaattattgttaaattttttagtgttattttgtgatgttaggtatgatgtttttgttatgttttagagatatatattgaagtatttaggatgagataatatgatattttagatttgttttatattatgatagaggaggagagaagttgggtatataaatgaaagataggtttgggttggtgattattgtagttagatgattgaaataaagaggattattgtattttatgtgtattttttatatatatgagaaatttatataataaaatgttaagtatatggaaattaaatgttattaaatataaattataaattataatgaggttagggagggagtggattgtgataaattgtttgttaaatattgagtatatttagttagtggttattttgttgtgtatttattaagtgttaggttttgttttgaggattggtagtgaataaggtagatataatttttgttttaaggtagattatatatatgtttataaggatttagataagaaaatacgtggttaaaattaggggtgggggtttttagaatatttaggtattttttagtgttattaggttatttttttagtgtttgagtaggaaatgttgggaggtgtttgtgggatttcgttaagtgttgttttttagaggtgttattgagaaaaatattttttagtttagattagagttttttagtaattaattgtttgagggtttttttttagagtaagtaatggaaaaatttagaagattttgtttttcgggtgttagtagaaaaggagggttttaggtgaggtggcgttttgtgaaaggaatttttagcgcgtttttttagttttatagcgttgtgtggatttgaatttcggggcggtattttttttaatgttttacgagggtttgggatttattttttttaaatttatgaggaaataagtatataagaaatttatatatttttattttaggttgttttttgtgtataaatgaatattttgttttattgttatttagatattagttttgtagtttagtgttttttttttagtgacgttttttttttaattatggatatttgtgagatcgtggggaggtgaagtaaaagacggagtaggttaggagtagtgggttatatttttaattttagtattttgggaggtcgataggggaggattgtttgagtttaggagtttaagatgagtttaggtaatatagcgagattttagtattataaaatagaaataaaaaattagttggatgtgatggtgtatgtttatagttttagttatttaggtggttgaggtgggagggttatttgggtttggtagattaaggttgtaatgagttatgattatattattgtatttaagtttgggcgataaagtgagattttgttttaaaaaaataaataaataaataaaataaaaaagaagattgagtagttttgatttattgttagatttatgagtatgagtatggtttgatttatgtttgttttttgagggataaaatttaaatttttaagcggttatgattagttttttttgtgttttttgttaaatttagaaattttatgttttttaaattatgtattagatggaggttatttaaggttataagtttgtaatgttatggaacgaattaataagaatttatttattgtttttgtttttagt

SEQ ID NO: 78 - DNA, 7108 bp, Artificial Sequence
  chemically treated genomic DNA (Homo sapiens)
attggaagtagaaatagtaaatgggtttttgttagttcgttttatagtattatagatttgtgattttgaatggtttttatttggtatataatttggagaatataagatttttgagtttggtaggggatatagaagaagttggttatggtcgtttggaaatttagattttattttttaagaaataggtatgggttagattatgtttatgtttatgggtttgataatgggttagaattgtttaatttttttttttattttatttatttatttatttttttgagatagagttttattttgtcgtttaggtttaagtatagtggtatgattatggtttattgtagttttgatttattaggtttaagtgatttttttattttagttatttgagtagttgggattataggtatgtattattatatttagttaattttttatttttattttgtagtgttggggtttcgttgtgttgtttagatttattttgaatttttgggtttaagtaatttttttttatcggttttttaaagtgttgggattaaaggtgtgatttattgtttttggtttgtttcgttttttattttatttttttacgattttataaatgtttatgattagggagggaacgttattggaggaaaggtattgagttgtagagttgatgtttgggtgataatgaaatagggtatttatttgtatatagaaaataatttggaatggaagtgtgtggattttttgtgtgtttatttttttataggtttgagaaaggtgagttttaagttttcgtgaagtattggagaaagtgtcgtttcgaggtttaggtttatatagcgttgtgaggttgaaggggcgcgttagaagttttttttataggacgttattttatttgaaattttttttttttgttgatattcgagggataagattttttgagtttttttattatttattttggaggaaaatttttaggtagttagttattgagggattttggtttggattgggaagtgttttttttagtgatatttttagaaggtagtatttagcggagttttatagatattttttagtattttttgtttaaatattgggaggatggtttggtaatattggggaatgtttgggtgttttagaagtttttatttttgattttaattacgtgtttttttatttgagtttttgtagatatgtatgtagtttgttttagggtaggaattgtgtttattttgtttattgttaatttttaggatagaatttggtatttaataggtgtataataaaataattattggttgaatatatttagtatttaataggtagtttgttataatttattttttttttgattttattgtggtttatagtttatgtttaatgatatttagtttttatgtatttagtattttattgtataaattttttatatatataaaaaatatatataaaatataatggttttttttgttttaattatttagttgtagtaattattaatttaagtttgttttttatttgtatgtttagtttttttttttttttgttataatatgaaataaatttgaggtattatattattttattttaaatattttagtgtgtatttttgaaatataatagaaatattatatttaatattataaaatgatattaaaaaatttaatagtaattttttaatattatttaatatttaattaatatttaggtttttaatttttatgtgttataagttatattttatagtttgtttaaattttaatgtaaataaggtttatttattgtgattagttaattttttttaaaatatattttaattgtttatgtgtttttttttatgtgttttttaatggatagatttttaaatttttatttggtaaaatttgtttattttaaaaaaataattggggatgtttttatttgaggttaaaatatttataggttatttagtatggaagttttttggtttattaaaatattttgatatagttaattaggtttaatttaagatgatttaatttagaatatatttttattttagttgtagttaagagttatcggatgggttttattttgtttcgtttattgaagtagtgaagtttgggtttttttgttatggtaatagttttttggtttttttaaaatgaatgaatgaatgtatgaatggatgaatgaatgagtttagagaagtaaaatgtacgttagtatatgaatggttgaataataggagtgttttttttttttatagtaggattgtttttatttttgaattttgtttgtattagataggtttaatattaatgtgattttatagggtttttttgagattttgaggtttttttgtgtaagatttttgtttttatttatttatttttatgttggtaattattttaggtattattgatttgtattatgttttaatttagttggtgattttatgtgttttataaaaattatatgttttattgatatatttagttttttttttaagagtttttaaattattgagttagaagggatttagttagttttttttttaggtttgtaatgaatatgttgaattttaaagaaagtatgtgtaatttgttaattagttagttagtgttaaagtttggattagaatttaggttttttgatatttagattagtttttttttgttatgttttattattgattatttatagtttgtagacgttattatttttagttattaatgattttttttatagaattggaaaaaatttttttaaagtttatatggaataaaaaagagttcgtattattaagttaattttaagttaaaagaataaagttggaggtattatattattttattttaaattatattataaggttatagtaattaaaatagtatggtattggtattaaaatagagatatagattaatggaatagaatagagtttttagaaataacgtcgtatatttataattatttgatttttgataaatttgataaaaataagtaatggggaaaggattttttatttaataaatggtgttgggaaaattggttagttatatgtagaaagttgaaattggattttttttttatattttatataaaaattaatttaagatggattaaagatttaaacgttagatttaaaattataaaaattttagaagaaaatttaggtaatattatttaggatataggtatgggtaaggattttatgtttaaaatattaaaagtaatggtaataaaagttaaaattgataaatgggatttaattaaattaaagagtttttgtatagtaaaagaaattattattagagtgaataggtaatttataaaatgggagaaaattttcgtaatttatttatttgataaaaggttaatatttagaatttataatgaatttaaataaatttataagaaaaaaataaataattttattaaaaagtgggcgaaggatatgaatagatattttttaaaagaagatatttatgtagttattaagagtatttatgatatgaaaaaatgtttattattattggttattagagaaatgtaaattaaaattataatgagatattattttatattagttagaatggtaattattaaaaagttaggaaataataggtgttggagaggatgtggagaaataggaatatttttatattgttggtgggattgtaaattagtttaattattgtggaagttagtgtggcgattttttagggatttagaattagaaatattatttgatttagttattttattattgggtatatatcgaaaggattataaattatgttgttataaagatatatgtatacgtatgtttattgtggtattatttataatagtaaagatttggaattaatttaaatgtttaataatgatagattggattaagaaaatgtggtatatatatattatggaatattatgtagttataaaaaatgatgagtttatgttttttgtagggatatggatgaagttggaaattattatttttagtaaattatcgtaaggataaaaaaattaaatatcgtatgtttttatttataggtgggaattgaataatgagaatatttggatataggaaggggaatattatattttggggattgttgtggggtggggggaggggggagggatagtattgggagatatatttagtgttggatgatgagttggtgggtgtagtatattagtatggtatatgtatgtatatgtaacgaatttgtatattgtgtatatgtattttataatttaaagtataataataataaataaataaattaaaaaaaaaagaagttattatttttatgttttttattttttaaattgtgagttttcgggaagtagagaagttgttatagtttttaagtatagtgtagtgtattgtttaaagtttagttcgtgttttataggatataatatggttagatattttaagagtaatttttttttttttttttttgttatttgtttatagcgtttattgttttagattatagtagtatagagtaattaaaaaataaattagggttgggtatggtggtttatatttataattttagtatttcggaaggttgaggagggaagattgtttgagtttaggagtttaggattggtttgggtaattaaataaagtttttatttaaaaaaaaaattagttaggattggtgttttatatttgtagttttagatatttaggaggttgaggtaggaagattatttgagtttaagatgttaaggttgtagtgaaatatggttatattattgtattttagtttgggtgatagaatgagattgttttaaaataaataaaaagtatgaaaaaagttaagttaggattatggtaataaaataattaattttaattatgaaatttattaatttgttgtttaaaaagaattattaaagtaattaaatttttttatatagtagaaatatcgtgattatataaaaaatatttttttttaattggataagtgttttggtagggtagtttagggtaatattttatttggtaaatagaaagaatttgtatatagaaggaatgtgtatgttttgttggatagggaatataatagtttaagagggggttattattatttttagatttatttgtttattattttaaaagttttatatatttagatttatttgtaattttgagattttaaattttgtttattttttggttttagatatttcgaataagaaggaggaggaggaagaagaggtagaagaggaaaaagaggaggaggaagaagaaagagggtaaagagaataaagagaaggagggaagaaggaggagaagaagaaggaaaaatagtatgttgtttggtgtttaattataaagttatttatataagtagtaaattaatttgtgtaaaattaatgatggaagtgtaaatttagattttgattgttaagtattggtgattggttttttatttggaagtgttagttttagaggaatacgattatttagatgtattttttttttattgattaagtggtgtttttaaatgtgtgattttgttagttttaaatttagtataattgtgtgttgatttttgtgaattataggaatgaattatacgaatatatgtttttaataaatagtttttttataagtaatttttggtatgtggtttggtattgatgtggttgtatttttagattgtttataatgatattatttttattttttttatattattaaattttttgtttttgttttttaaattgttgaatattatttttttttatcgatttgttttttaggaattaataaataatgtttaaattgttttttaagtatatagaaaaatagtaagaatataaagtatttatataaattaatatatttaaatttgttttttttagtgaagtagatatgagaatatttatgaagatgtttaaggttaatattaatttgagtaaagtttagtcggttttcgtttagttttttaaggttattttttgatgtgtatgttagttgttttaatattatgataatttttgttttttgaagggggtggagtttagttgggagtagttatttttatattattttagtttttagagttttatgatttgttaggaagaaaatgatagtaattaattttaaggttatttataaatgtataaaaagattttatatttatttggttgttttagaaggttattggggattaagtattttgtgaatattgtttaaggaggattttgttaaataggttgtagatttatgatagatgagaaaatattgtggggagaggaggaaagtgttataggagagttataggagatgttaggaaaggggatttgataaagagtatagggagattgttttttaaatttgtttaaaaagattaaattataaataatgttataaaattttataggtttaaagaatttggttgagttgtttttgttttgggtagataaaagattttagttgtatttttcgaggttatttgtagatttttttttgtgatttattagttagtttttttttttagtttaaggttttgtatgttgttttttttatttggagtattttttttttttttgttttaaggtattttgtgttttttttattatattattttttttatatttcgtgtattatgtttgttttttttttgttgagtatgagttttttgaggtagggttttaagttttggtggttaattaagttttcgtggttaattatagtgtttggatatagaaagggtttaatatacgtatatgtaatttttatttttttaaaggaaattgtttgatatatataaatttggaaagaatattataaagttttgatgtatttattattttgttttaaaaattattgataatatttgaagtaaattttagatttagttttttttttttataatttaatttgtattttttaaatttgtgggtgggggagttatttatgtaatagaaaaattgtaaaattagtataagttttttaaatattttttatttagtattcgttaatgttaatattttatgtaattatagtataatgattgaatttaggaatttaatgttgatatattattgattaaattttaggttttatttgaattttattagttttttaattagtatttttttt

SEQ ID NO: 79 - DNA, 5312 bp, Artificial Sequence
  chemically treated genomic DNA (Homo sapiens)
gatatattttattttgtttgttagtatttgtttttaatagattagtttttaaaattttgataatatgttaggtagattttttgttaatttgttttgagaatgtaagaatgttgttagaagagatagaaggaattatgaattttagtttagaggttttattataggtttttggtaaagtgggatttagtgtattttgattgtttggtatagtattgttttaaaaattagaatttttttatattttgtagtttagatagtatatataaatgtagaagtttaggttttgtcgggattgagtttttgtgtggtgataattggttataattttttttttttgaatatttgtagttttttttatttttgttgtttttgattttcgtttatagatttatttttttcgttggtgtgatttttgtggttattatggtagttattttggagagtcgttagtttagtttttttcgtttttcgtagagttttatttttgtttttgaagaagttatttggggtttggttttttttttggttttttagagtttttgtaatagtaggtattattttttttttttgtatttaattttttttttattttattgttttttagtgtgttaaaatacgaagatgtgttttgatttttaaaattttttttttgaagtttttatttgatatgtagttggagatgggtaaatatagcgtttttgaagtattattttatttatagtgtttggaatgtagtaggatttcgataattgttgttttaataaaggaatgattaaatatattaatattgtaaaaagtaaagtagaggtttttttttaaagagatttttttttttatttaattaagaataagtcgtaattttttttagaagtaaaatttatttaaagatcggtgttgatattttgaaatatttgttagttgtaataaagaaattaatgtattttatgtttttaatttttataatttagtttaaatatttgttttggtatgtttatattgatttaaataagtatgaggttatagtttgttttttttttttatttgaaggtgtttttattttatttagtattttataagtgagttttttttttttttgtttttttttgtttttgttttttttaaaaagttttaagttgttagttaattaggataaatatagaatgtgaggtttcgttttagttagtggaaattggatatagtagtagggtggatatattaagttataaatgatttttttttttttgtttagtgtattttcgtggtaaaattgttggcgagtgtattttttttgtagaaagtaaaaatggtttttgttgtaggaagttagggatttcgaacggagggatcggttggagttgtagtagaggaatataaattgtaaatattttattttaatatggatatttattagtttttaaattaatatttttataattttttatgtttgttttattttaattttttaattttgttatttttttaagttgaggatataggttattttaggattattgtgataattgtgttaattgtataaattgattgtaaaatatgtgtgtttgaataatatgaaattagtgtattttgaaaaagaatagaataatagcgatttttagggaataagagaagataattataaggtttgattgttcgtagggtcgggtaaaatagagttatgtttttttttttgtagagagtttataaatggatatgtaagtagggaagatattgttaaattttttttttagtagggaatattaatattaatattttgggaaaggaatgtatttttggggggaggtttataaatagtcgttttgggaatgaatgattgttttatgtagttgagataaggattgaaatatatttcggttttttgtagtatttttaggtggggaaaaaatttggttttggtaaatttgtggttagattggttttttgtttttgaattttgtgttttgttgtttaagatgtttattaagataatatgtgtattattgaatatagatttttattaggagttttatttttgtttttgttttgtttttttagaagtatgtgatttttgttttgttttttgttttttaaagtatgtgattttcgtatttattttttgttcgtatattattattttttttgtaatttttaataaaaatttgttggttttgaggttcgggtaggtattatggttttatcgatatgtgatgttatttttggcggtttagttgtaaaatttttttttttgtattttttttttttattttttagttggttgatatttatggaaaatagaaagaatttacgttgaaatattgggggtaggttttttaatagttttgttgaggaaattaaatttatgtttaagtgttatttttttatggtattaaggaataagtattttaaataatattaatgtaatagtattggttttatgtgttttaaaattattatttttatgagtgttagtttttttaaaaaatcgtttttttttttaattggatttagatattttattttttatagtttaagacggattaatttagaattataaatttttaatgtataatgagaaatataatgttttttagggttaggtatttgtgtttgtgttggtgttattgttttaatgtaggaaaatttatgtaagagtttattgtgaggttaaaattgttttttaaatatggatatttgttaggtatttgagttgggagtattgtttaggtttggatgggcggggagtgtttgtaataaggattgtgttttgttagttttagtgatatagtgtttaagtgttttaatttagtagttatttgttgattatttgatttttgtggtttaatagggatgtgatgaagtttatttgtttatttaattttaaattatatattatttaggtggtttgaaatttttttgatatattgggtttattttttggagttttaataatgttttagttaatttataaaaaataaaataaaataaaataaaataaaataaaataaaaaaattattttttttgtagtataatagtttggtttatattgtaaaatgattttttattaaaggtttattatttatttttatatgtttattattatttgtaatattttttaaagtagttaattttaggttaatttattgtataatttttttgaaagttttttttttattttgaaagaagaaagttggtaggttggatattgttttcgtggaggttgtattatgggttatatattacggtgtgattttaaaggttattggagttatcgttttatattgaagaatatatatgggttaggagttaggtttaggttcggaatggtggatttggagaggggagggtttttgtttgtggttttgtggggagtttttaggtttttttttggttattattttttgatttttttttttagtaggatagggttttggtttttttgagggataggttttgtggtaggttaggcgttattaatataggtttttataataattgttttagtattgattgagtggtgaagttaaatattaaaagttgaaaaaagttagtatttttatatagaggttggatgtaataaaagtttattaagagttttgtttaggttttttttgggttttaaagtatgataaaataatgaaggaatttttaataggatttatttagaattaaataagttttattgtgagtttgaagaaattttttaggtttttataaataagtttattgggcgtttgaaggaattttttaaattttcgtgatttagtaggagataagataagggtaattatttttcgtatttggatttatttagattaaataaatagattgaggttttagaataaggtttttaggatttagattttagttatagattaaagaagttaattatttatgtttttagatgaatgtatatttatttgtagatatatattttagaaggtatatatgttttggaaaattttgtaatattgagttggtttggtggtaatttttaggttttttttttgttatcggttgtagaaataaaatttttttttttttttatttgatttgtatttcgttattgggtttagagaaatagtagtcggatttttagtttggttcgggaagtttttttattttttttcgtttgttttttgtggttattgtatttattgttgttgttgttgtttcggtttttgtgaggtttatttagtggattggttggatatttttagggggtattttagatattttattaatttgttggatttgatttttggatttcgatttataaattgtgttaaaatacgaagtggttaatttatatagtatttagttagatgatcgaaggatttagtattcgagggtttttaatagaaaatatagattatattttttttattttggttttttttttgggggttttttttatattattgatattgtttttgtgtaggcggggttagaggggagattaagttttgggagtagttttcggattagaggaagttttgtttttatagtgataggggttgaattaaatttttaggttggggttattattttttagtttgatttttgtagtcggagttttttagagtttttgggaattcggtagcggagagaaggttgagggatatcgcgggtagggaggagaagggagaagagttttgtttcgttaggatttggttggtgttttaagcgtatagttaagtcgttgtggatttagtaagggttggatggattcgtggagttttagggttgggtagggaagttggcgaggtcgagtttcgttttgggtttttgggcgttttgatttcgttttcggaattttcgggtttgggaggcgggaggaagttttattgagtgtagttttaggcgttttttttcgggtttttagaatggcgtttttcgggttgtggcgggtcgaggggcggggtcgtagtaaggtttcgtttgtttttttttcggagtttttatattttgagttttgttcggtttaggtttgtttgcggaattcgtattaattagtattatgtttatgatattggggtattgggatattcgcggggtgagcgagggttcgttggacggtgggacgagggcgtaggggagggaagtgcgaagtagttgcgggacggattttagggatcgtttttttttagggttgttcgttttagaagggtttgtgtatgtcgttgtgtgtgtgttgggggtgtgggcgggtagaggaggtaacgggtacgtgtagtgtaaattgggggtttttttggtgtagataaagttagggattttttatttttgacgcgatttgcgggttattttttttagt

SEQ ID NO: 80 - DNA, 5312 bp, Artificial Sequence
  chemically treated genomic DNA (Homo sapiens)
gttgggagagatggttcgtaggtcgcgttagagatggagggtttttgattttgtttgtattagggaagtttttagtttatattgtacgtattcgttgttttttttattcgtttatatttttaatatatatatagcggtatgtataggtttttttgaggcgggtagttttgaagaggaacggtttttagagttcgtttcgtagttgtttcgtattttttttttttgcgttttcgttttatcgtttagcggattttcgtttatttcgcggatgttttagtattttagtattatgggtatggtgttggttggtgcggatttcgtagataggtttaaatcgagtagggtttagagtataagagtttcggagaggggataggcggggttttgttgcgatttcgtttttcggttcgttataattcgaaaggcgttattttggaggttcgggagagggcgtttggggttgtatttagtaagattttttttcgttttttaggttcgagggtttcgggagcgaagttagggcgtttagaagtttaaggcggggttcggtttcgttagtttttttatttagttttgaggttttacgagtttatttagtttttgttaggtttatagcgatttggttgtgcgtttgagatattagttagattttaacggagtaaagtttttttttttttttttttttgttcgcggtgttttttagtttttttttcgttgtcgagtttttaagggttttgggagatttcggttgtaggggttagattaaaaagtggtggttttaatttgggaatttaatttagtttttgttattgtaagagtaggattttttttgattcgaaagttatttttagggtttagttttttttttagtttcgtttatataggaatagtgttagtggtataggaaggatttttaggaaaagggttagagtaaaggaaatgtggtttgtgttttttgttaggggttttcgggtattgagtttttcggttatttggttaagtattgtgtaaattagttatttcgtattttggtataatttatgaatcgaaatttaaggattagatttagtaagttggtgaggtatttgaggtgttttttagaaatgtttagttagtttattaggtgaattttatagagatcggaatagtaatagtaatagtgagtgtagtggttatagagagtaggcgagggaggatggaagaatttttcggattaaattgagggttcggttgttatttttttaggtttaataacgagatgtagattaaatggggaggaagagaggttttatttttgtaatcggtaatagggagaaggtttagaaattattattagattaatttaatattataaagttttttagagtatatatattttttaaggtatatgtttataagtaagtgtgtatttatttaaagatataagtgattaatttttttaatttgtaattgaggtttgggttttgaggattttattttggagttttagtttatttatttaatttaaatgggtttaggtgcgggggatgattatttttattttgttttttgttaaattacggaggtttggggagtttttttagacgtttaataaatttgtttgtggaggtttggggagtttttttagatttataataaaatttgtttaattttaaataggttttgttaagaatttttttattgttttgttatgttttaaggtttaggaaaggtttaagtaaaatttttggtgggtttttgttatatttagtttttgtataaaggtattggttttttttagtttttaatatttaattttattatttagttagtattgaaatagttgttatggaggtttgtgttagtgacgtttggtttgttatagaatttgttttttagagaagttagaattttgttttgttgaggagggaggttagaggatggtggttagagaggagtttgagggttttttataggattataggtagggatttttttttttttagatttattatttcggatttggatttggtttttgatttatgtgtgttttttagtatgagacggtggttttagtggtttttgaagttatatcgtgatatgtgatttatggtataatttttacgagaataatgtttaatttgttaattttttttttttaaggtagaaggaagatttttaaaagagttgtgtaatggattagtttggggttgattgttttaaaggatattgtaaataataatggatatatggaaatagatgatagatttttaatgagaaattattttgtaatgtaaattaggttgttgtgttgtaaaaaaagtagtttttttgttttgttttgttttgttttgttttgttttgttttttgtaaattagttaaaatattgttaggattttagaggatgaatttagtatattaaaaaagttttaaattatttggataatgtgtggtttggggttgagtaaataggtagattttattatatttttattaggttatagaaattaggtggttagtaggtggttgttaagttggggtatttggatattgtgttattgaggttggtaaggtatagtttttgttgtaaatatttttcgtttatttagatttgggtagtatttttagtttagatatttggtaggtatttatgtttaggaagtagttttggttttatagtgaatttttatatagatttttttgtattgaggtaatagtattagtatagatataagtgtttggttttaggaaatattatattttttattatgtattaagagtttatgattttgagttaattcgttttgagttgtgaaagataagatgtttagatttaattgaaaaaaaaaacgattttttaagaaagttaatatttatgagaataataattttgaaatatatagaattagtattgttatattagtattgtttgaaatatttgttttttggtgttataaagaaatagtatttgaatataaatttaatttttttagtaaggttattggggaatttgtttttaatattttaacgtaggttttttttattttttataagtgttagttagttgagaaataaagagaaagagtataaagagaagaattttatagttgggtcgttaggggtgatattatatatcggtaggattatgatgtttgttcgagttttaaaattagtaagtttttattaaggattgtaaaaggggtggtggtgtacgaatagagggtaggtacgaagattatatgttttaaagggtaaaaagtagaataaagattatatgtttttgaggaaataggataaaggtaaaagtagaatttttgataagggtttatgtttagtggtgtatatattgttttgataaatattttaaataatagaatatagggtttaagagtagagaattagtttgattataaatttgttagggttaggttttttttttatttgagggtattgtaggagatcggggtgtattttagtttttattttaattgtataggatagttatttatttttaaagcggttgtttatagatttttttttaggaatgtattttttttttagagtattaatattaatattttttgttaggaaaagaatttagtaatattttttttatttgtatgtttatttataggttttttgtaagaagaaaaatatggttttattttgttcgattttgcggatagttagattttatggttgtttttttttgttttttaaaaatcgttgttattttgtttttttttaaggtgtattgattttatattgtttaaatatatatgttttataattaatttgtatagttaatataattattatagtggttttgaggtgatttatatttttagtttaagaagataataggattaagagattaaagtaaggtaggtataagaaattataaaagtattaatttgggaattgataaatgtttatattaaaatgaaatatttgtaatttatgtttttttgttgtagttttagtcggttttttcgttcggggtttttgattttttgtaataaaggttatttttattttttgtagaaagggtatattcgttagtagttttattacgagagtatattgaataaaggagaaagggttatttataatttgatgtgtttattttattgttgtgtttagtttttattggttggaacgggattttatattttgtatttgttttgattggttagtaatttagaattttttaaaagaggtagaggtagaggagaataaaggaagggggaatttatttgtggaatgttgagtaaggtaaaaatatttttaaataaggaagaggaataggttatgattttatgtttgtttggattagtataagtatgttagggtaagtatttaggttaaattgtgggagttaagaatataaagtatattaatttttttattatagttagtagatattttagaatattagtatcggtttttgaataaattttgtttttaagagaagttacgatttatttttaattagatggggagaaaagtttttttgaagaggaatttttattttattttttatagtattaatatatttggttatttttttattgaaataataattgtcgagattttattatattttaggtattatgaataaaatgatgttttaaggacgttgtatttgtttatttttaattatatattaggtgggaattttaggggagagattttgaaaattaggatatattttcgtgttttggtatattgagaggtagtggagtgggagaggggttgagtgtaggagagagaagtagtgtttgttgttgtaaggattttgaggagttaggaagaaggttaggttttaggtggtttttttagaagtaggagtagagttttgcggaaggcgggaaggattggattagcggttttttaaagtagttgttatagtggttataaggattatattagcggggaaagtgggtttgtggacggggattaggagtagtagggatgagggaagttgtaagtgtttagaaggaaggggttgtagttagttgttattatatagaaatttagtttcgatagggtttggatttttgtatttgtatgtgttgtttgaattgtaaaatgtggaaaagttttaatttttaaaataatgttgtgttagatagttaaaatgtattgggttttattttattaagggtttgtaatgggatttttggattggaatttataattttttttgttttttttgataatatttttatatttttaaggtaaattaatagaaaatttatttaatatgttgttagaattttaaaaattaatttattagaaataaatattgatagataaaataaaatgtatt

SEQ ID NO: 81 - DNA, 5326 bp, Artificial Sequence
  chemically treated genomic DNA (Homo sapiens)
aagtgttgagtaaaaggatttagataggagaaaggatatacgattttattttatttatacgaaatttaggagagggaaatgagtttatggtattagaggttagatgattggtgattttggtgagaattggaaggttgtttattgaaggtttttggtgtagtgttgtaagttttttttttttatttgggaggtgattttagaagagtatttaagtggaaaagtttatagagtagtatatttaaggtttatgtattgtatgtattatattttaatgaaaagtatgtttggttaggtgcggtggtttacgtttataattttagtattttgggaggtcgaggcgtgtggattatgaggttgggggtttgagattagtttgattaatatggtgaaatttcgtttttattaaaaatataaaaattagttaggcgtggtggtagcgtttgtaattttagttatttaggaggttgaggtaggagaattgtttgaatttaggaggtagaggttgtagtgagttgagattacgttattgtatattttagtttgggcgatagagtaagatttcgttttaaaaagaaaaaaaaaaagtatgtattaaggtttgtgtattgtatgtgtattatattttaatgaaaagtatgtttatatgttttatattatttgtgtgtttgtgttggtttgtttttttttataagatgttaacgtttttaggatatgtgtttttgtttttttttgttcgttgatgtaataggtgtttgtatattatttaggatagtttttgagtatagtaggtgtttattgaatagttattaggtaaattataggttttattttaatggtgttattttaaattttttttagatttttatttatgtttatttttttggataggtgagattgatgggtatatatatttttaggttttgtagttttttttttttaatattttatttaagaatttgtatatgttggtagtttatatgtatgtttatttttagtatttaatggttattattattttttgtggataaattatagtttgtttagttatttttattttattgggtatgtggattttttttatttatttatttttagaatagagtgattatgtttaaattaattttttttttggtttttgggtattttatttgagttggtttttaaaggtaattattataaggtaaaaggtgagaatggtgttatggtattattatagataaattgttttttagagagaatagtttttttttttttttttttttttttttttttttttttgatgtggagttttattttgttatttaggttggagtgtagtggcgcgattttagtttattgtaattttcgttttttgagttttagtaatttttttgtttttgttttttgagtagttggaattacgggcgtgtgttattattttcggttaatttttgtatttttagtagagatggggttttattatattggttaggttggtttcgaatttttgattttacgtgatttgtttgttttagttttttaaagtgttaggattataggtttgagttatcgcgtttagtttagagagaataatttaatttatggtgatatttgtaagttatatggatttttttgtattattttaggtatttgagggattgtagttttattttataatatttttataggtttatagaatatttttaagttttttatttttattttttttgtttatagtgtgtgtatgtttttgttaatgaattatagtttatgaatttattcgtttttgaattttttgtataaaattttttgtttatttattttttatttgtggtttagttaatttttggagaaaggttaaagaatgattttgtggtagttaagattttttttttaataggtataatgtaattaattatgattttgttttaggttttttgtggtataatgtgatggttaattttttgtattaatttgattgggttaagggatgtttagatggtaggtaaaattattgtgtttgtgagggtgtttttagaagagatttgtttttgaattagaagatagtaaagattttttttagtaatgaaggaggtatttattaaattgttagggtttagagagaagaaaaagataggaagggtgaatttgatttttttgattgggatatttatttttgtttattttgggatttttatatttttggttttttggtttttagatttgattagggattaatattatcgttttttatttttatttttgttttgaggtttttagtttttgaatgatattattggtttttttgtttttttattttgtagtcggtagattatgggatttttttattttaaaattgtgtgagttaatttttataatagatagataaatttataaataaatatataaattttttatagttttattttagtggtgttattttaaattttgaagaattttgatttagtatatatagtaaaaaataataacgataataataataaataaaaatatatatatatataaaaatttattattaataagttttaaaaaattaaatataagataaaacgttgtagtatatttattatttgggggtttttttatatggaaagtattttttgagatgttttgtagtaaattttaaggagattttgagggaagatattttttttttttttggtaaatttttttgttgatgattattattttaaagattttaaagatgaaaatatttgtttgtatattttgtcgatttattttgggtgagggtttttggtaggtttggaagggtgggtgaatagtggaagggggttgtttttggtgattagtattatttatatttatgtttgtggtagttattaggtgtttattatatattcgatttttggttatttttaatgggggtgttaaatgtaggaagagtttagttaagttattgtaaattggtattgatttttgggatttttttatatacgatagttaggtagatattttttttttaaatttgatttgttattatttttttttgagatagggttttattttgttatttaggttggagtgtagtggtgtgattacggtttattgtagtttcgattttttaggttttaatgatttttttattttagttttttaagtagttgggattataggtaaagggttattatggttagttaattttcgtatatttggtagataatgttttattatgttttttaggttgggtggatattttttaaaaataagtttagtttattttgtttagttttgttttagtagttttagaggaattatttattttggtgttgggtttaggttgtttgtttttggaataatgtgtttagagttgtagggtaggtttgttgtttgattggtagagagagttttatattttttattttgtattttgaaagattaaggttgtttagtttgtttatttggtagattatttttttgtttaatttttttttttttatttttgatgtgtagtttgatgtttgtagggattgtgttagttgagattgtttttaggtttttttttttgttagttggtgtttagggaagtgggttttttggtttgttttttgttattagaattttgaggattttgttttttttattgtaatttttgatttatttttgggttttttttttttttttttgagacggagttttattttgtcgtttaggttggagtgtagtggtgtaattttagtttattataatttttatttttttggtttaagcgatttttttgttttagttttttgagtagttgggattataggtattcgttattaggtttggttaatttttttgtatttttagtatagtcgggattttattacgttggttgggttttagattagggtttttttattttagtagtattgttattttggagggtaaaattatttgttgtggggtattgttttgagtattgtagggtgtttagtattttacgtaaattttatttattagatgttatgggcgttttttagtggtgataattaataaagtttttagatagatttatatgttttttgaggggtaaagttatttttatttgaagattagtggtgtgttggatggatattaatattaaaataataataataataataatagaaattataatataatttatgtagttaaggtaagttttttttgatggaatatttattttagttaataatatttgtgtatgtttgttttggtagttttttttttttaattttttattttgatttaatatgagagtttgagaaatttataaaacgaatgaatataaagatttttgattattttagattttaacgtttttatatgggtttttttttttttttttaagtttattagtttttgttttttatttttttgtttttttttttatttagtaagttttttaggagtatagtattatttatgataaaaatattatttttttttttttgaggcggtatttttgacgtttggatttaggttgataagtgatagtgagttataattatttttgtttgtgttgttttttttacgttaggtttgttatgttacgtatgttcgtagtttataataatttttattatatattgaaaagttttgaaaatttatttagtgaatttttgagtattaaatgtttttttgtgttatttttttttattaggttattattattttatttagaatttttttgttttagagagagttttttttttttgtttaatttagagtgtagcggcgcgattatagtttagtttagttttgaatttttggatttaattagttttttttcgttttgggtttttgggcgttttgattttttttttgaaatttacggggttgggaggtgggaggagattttatttttagttttatgagcgcgttttaggtttttagattggttcgtttcgggggtagggcgggtcgtggggcggggtcgtagtaaggttttttttttattttttttgggttttttataaacgttgagtttcgtttcgttgaggtttgtttgtagaatttatagtaattagtattatgtttatgatattggggtattggaatattcgcggggtgagttagggttcgttgggcggtgggacgggggtgcgtgggggcggggaagtgtggagtagttgtaggacgggttttagggacggtttttttttagggttgtttttgatagcggggtttgtgtttgtcgttgtttgtgcgtgtggttgggcgtgcggggtgggggcgggtgaggtaggaacgagaggaggagatggggttttttttgtgtagagtcgttataaagttagggattttttatttttgattcgagttgtgggttattttttttagt

SEQ ID NO: 82 - DNA, 5326 bp, Artificial Sequence
  chemically treated genomic DNA (Homo sapiens)
gttgggagagatggtttatagttcgggttagagatggagggtttttgattttgtgacgattttgtataaggggagttttatttttttttttcgtttttgttttattcgtttttatttcgtacgtttagttatacgtatagatagcggtaagtatagatttcgttgttagggatagttttgaagaggaatcgtttttagagttcgttttgtagttgttttatattttttcgtttttacgtattttcgttttatcgtttagcggattttggtttatttcgcggatgttttagtattttagtgttatgggtatggtgttggttgttgtggattttgtagataggttttagcggggcggggtttagcgtttgtgagaggtttagagagggtagaggggaagttttgttgcgatttcgttttacggttcgttttgttttcgaaacgggttaatttggaggtttggagcgcgtttatggggttaggagtaggatttttttttattttttagtttcgtgggttttaggagagagattaggacgtttagaagtttagggcgggggagaattggttgagtttaggggtttaagattgaattgagttatgatcgcgtcgttgtattttaggttaggtaagaaagaaaggttttttttaaaatagagagattttgaataaagtaataatagtttaataaagaaaaataatataaaagaatatttggtgtttagggatttattggataagtttttaaaattttttaatgtatgatagagattgttataaattgcggatatacgtggtatgatagatttaacgtgggaaggataatataggtaaggatgattataatttattgttatttattagtttaaatttaaacgttaggaatatcgttttagagaaaagaaaatgatgtttttgttataagtggtgttgtgtttttagggagtttgttgggtgggaagagagatagaaaggtggggagtaggggttggtggatttggggagggaggagaaagtttatgtggaaacgttagaatttggggtaattagaggtttttgtatttattcgttttgtaaattttttaaatttttatgttaaattaaaataaaaagttaaaaaaaaaaaattattaggatagatatatataaatattattaattgaaataaatgttttattaaaaaggatttattttaattatatgagttatattatgatttttattattattattattattattttaatattagtatttatttagtatattattggtttttaagtggaggtaattttgttttttaggggatatgtaggtttgtttggagattttgttaattgttattattgggaagcgtttatggtatttagtgggtagagtttgcgtaggatgttgaatattttgtaatgtttaggatagtgttttataataaatgattttgttttttaaaatgatagtattgttgaggtgaagaaattttagtttaaaatttagttaacgtggtgaaatttcgattgtattaaaaatgtaaaaaaattagttaggtttggtggcgggtgtttgtaattttagttatttaggaagttgaggtaggagaatcgtttgaattagggaggtggaggttgtagtgagttgaggttgtattattgtattttagtttgagcgatagagtaagatttcgttttaaaaaaaagaaaaagaaatttaggaatgggttaaaagttgtagtgggagaaataaggtttttaaaattttggtggtaggaagtaggttaaaggatttatttttttggatattagttggtagaagggaggatttagagataattttagttggtatagtttttgtaggtattaagttgtatattaggaatgagagaaggagaattgggtagggaaatggtttattaggtggataggttgggtagttttgattttttagggtatagggtagggagtatgggattttttttgttagttagatagtaggtttattttgtagttttgagtatattattttagagataggtagtttgagtttagtattagagtgggtaatttttttagagttgttggggtaaggttaggtaggatgaattgaatttatttttgaaaagtatttatttagtttgggaagtatggtgaaatattgtttattaaatatacgaaaattagttggttatggtggttttttatttgtggttttagttatttgagaggttgaggtgggaggattattggagtttgagaagtcgaggttgtaatgagtcgtgattatattattgtattttagtttgggtgatagaatgagattttgttttaaaaaaaagtaataataagttaaatttaaaaagaaggtatttatttgattatcgtgtgtagaaaggttttaaaagttaatgttaatttgtaatgatttgattggattttttttgtatttaatatttttattaggggtggttaaaagtcgaatatataataagtatttgatgattgttatagatatggatatgagtgatgttagttattagaggtagtttttttttattgtttatttatttttttaagtttgttagagatttttatttaaaatgaatcgataaaatgtgtaagtagatgtttttatttttggagtttttaaaataatgattattaatagggagatttattaggagaaaagagaatatttttttttaaaatttttttggagtttattgtaaggtattttagaaagtgttttttatatagaaaagtttttaggtaatagatatgttgtagcgttttattttgtgtttgattttttaaaatttattgatgatgagtttttgtgtgtgtgtgtgtttttgtttgttgttgttgtcgttgttgttttttgttatgtgtattaggttagggttttttaaaatttgaagtgatattattaagataaggttgtaggaaatttgtgtgtttatttataaatttatttatttgttatgggaattggtttatataattttggagtgaagaagttttatgatttgtcgattgtaggatagagaagtaggaaagttagtggtattatttagaggttaaaggttttagaataaaggtgggggtgggaggcgatggtgttagtttttgattaagtttgaaggttagagaattaggagtgtggaggttttaggataggtagagatggatgttttagttagagaggttaaatttattttttttgttttttttttttttttgggttttgatagtttggtggatgttttttttattgttgaaggaaatttttgttgttttttgatttaaaggtaaattttttttggaaatatttttataagtataatgattttatttgttatttgagtattttttagtttagttaagttgatgtagaaaattgattattatattatgttataggaaatttagaatagaattataattaattatattgtgtttattagagagaaggttttgattgttataagattattttttaatttttttttaggagttgattaagttataggtagagaatgggtaaatagagagttttatataggagatttaaggacgggtagatttatagattgtgatttattggtagaaatatgtatatattataaataaaaaaggtgaaggtagaaaatttgaaggtattttataaatttataaaaatattataagatgaaattgtaattttttaagtatttaaggtagtgtagaaagatttatgtgatttgtaggtgttattatgaattaagttattttttttgggttgggcgcgatggtttaagtttgtaattttagtattttgggaggttgaggtaggtaaattacgtgaggttaggagttcgagattagtttggttaatatggtgaaattttatttttattaaaaatataaaaattagtcgagggtggtggtatacgttcgtaattttagttatttaggaggtagaggtaagaaaattgttggaatttaggaggcggaggttgtagtgagttgagatcgcgttattgtattttagtttgggtgatagagtaagattttatattaaaaaaaaaaaaaaaaaaaaaaaaaaaaaaaaaaaagttattttttttagagagtaatttatttatgataatattataatattatttttattttttgttttgtagtaattgtttttggggattaatttaaataaagtatttaaaaattagagaaggaattagtttaaatatgattattttgttttaaaaataaataaatgagaaaaatttatatgtttaatagggtaagaatgattaagtaaattataatttatttataggaagtaatgatagttattaaatgttagaaataggtatgtatatagattgttaatatgtatagatttttaggtaaaatgttaaagagaaaaaattgtagaatttaagagtgtatgtgtttattaattttatttatttaaagaagtaggtataaataaaaatttaaagggaatttgaaatgatattattaagatagagtttataatttgtttaataattatttagtgagtatttgttatgtttagggattgttttaggtgatatgtaaatatttgttatattagcgaataagaagagataaaaatatatgttttgaggacgttgatattttatgagggaaagtaaattaatataagtatataaataatgtaagatatatgagtatgttttttattgaagtgtaatatatatatagtgtataggttttaatgtatgttttttttttttttttttgagacggagttttgttttgtcgtttaggttggagtgtgtagtggcgtgattttagtttattgtaatttttgttttttgggtttaagtaatttttttgttttagttttttgagtagttgggattataggcgttgttattacgtttggttgatttttgtatttttagtagagacggggttttattatgttggttaggttggttttaaatttttaattttatgatttatacgtttcggttttttaaagtgttgggattatagacgtgagttatcgtatttggttaagtatgttttttattgaagtgtaatatatatagtgtataggttttaagtgtgttattttgtgggtttttttatttggatatttttttggaattattttttagataaagagagaaaatttatagtattgtattaggagtttttaataggtaattttttagtttttattaaggttattaattatttgatttttgatattatggatttattttttttttttgaatttcgtgtaagtggaatgagatcgtgtgtttttttttttgtttggatttttttatttaatattt

SEQ ID NO: 83 - DNA, 5297 bp, Artificial Sequence
  chemically treated genomic DNA (Homo sapiens)
ttgtgtagttttaggattgggaaagtattataaaggagggaaaggaataagagatataaagagaaaggaggttgggggtattattttaaatcgggagatgaagttttttaggtttgggaaggtatttaggtagttgggtttaaatatttggttttttttaaggatattataagcgatgaaatttataaaggtgatttggataaggttaaggatatgtgggttgaaatttttataatataggaagtatgataaatttgtggtgtttttattatacgtttttattattttgtttttaagaaattatggttgtttttttagaaattgtgagtagagttttagtattttagggagtgtttgtaggtattttggttttagttttttttgaggtagaaaatagttgttaatatttttagatataagttttttgtatagatgcggttttttagttttgtgtatggttttagttggtcgcgggtaagtagttattttttttatagttggaattgggttattgtttaggttttagttggatatattagtatttattagattttaattgggtagttggagtttttttgaggtgatgggatggtagagcggaatgtgatattgtttttaaatttgtttttattgattttttaataatttttgggttagttttaggagtatttgagtatttggtaggttttggattagatatgagtagaattaaggatgtaaagaattaaaggagtttagagaaagaagtagaaatttttttttagttgggtagtagaagaatataatggatattgagtggtttttggaaagatgaggagatatttagaggatgagtggaagaaaggagggggaaaaagagtttttggttgtttttaagttgtttgttaggaaaattcgttgattttagtgtatgttaagagagtattcggaagatattaaaattttaggtgttattatttttttgttttgtatttgttttttttatagtttgtgtatttttaaagtaggtagatgatataaattattgggagagatggtttaaagtataggttatgggttagagatggaagggattttggaagtaattattattgtttagagagtgaatttatattttggggagttaggattttataagtagattggtggggaattgatttagaggttttatttgatacgattttggggtttgagggttattttggtggtagtataggaaatagtttgaaggatgagtagtattaaagagtttaaatagaaaataggattcgtgtatttggtaggattattgttttggtttttgattaaaatgagaggtgaagttggttgggtttttgggttaggtgaggatttggagaatttttttgtttagttaaaggattgtaaatgtataaattagcgttttgtgtttagttaaaggtttgtaaacgtattaattagtattttgtaaaaatagattaattagtattttgtaaaacggattaattagtattttgtaaaatggattaattagttttttgtaaaatggattaatttgtatgtgggtggggttaaataagggattaaaaggaggttatttttttttttttttttaaagtggttaaagtatatgagtagatattttttaaaagaagatatttatgtagttaaaaaatatatgaaaaaatgtttattattattggttattagagaaatgtaaattaaaattataatgagttattattttatattagttagaatggtaattattaaaaagttaggaaacgaggtgttggagaggatgtggagaaataggaatatttttatatttttggtgggattgtaaattagtttaatattgtggaagttagtgtggcgattttttagggatttagaattagaaatattatttgatttagttattttattattgggtatatatttaaaggattataaattatgttgttataaagatatatgtatacgtatgtttattgcggtattatttataatagtaaagatttggaattaatttaaatgtttaataacgatagattggattaagaaaatatggtatatatatattatggaatattatttagttataaaaaatgatgagtttatgttttttgtagggatatggatgaaattggaaattattatttttagtaaattatcgtaaggataaaaaattaaatatcgtatgtttttatttataggtgggaattgaataatgagaatatatggatataggaaggggaatattatattttagggattgttgtggggtggggggaggggggagggatagtattaggagatatatttagtgttaaatgaggagttaatgggtgtagtatattaatatggtatatgtatatatatgtaataaatttgtacgttgtgtatttgtattttgaaatttaaagtgtaataataataaaatttaaaaaaaagaaagtaatgtaaaaattgtaaaaaaaaaaaaagaaaaagaaaagaaaatgggtataatatttattttttaaagttgttgtgaagtttaaattggaataaattagttaatatacgtaaatatttagatattgtttggtatatgataggtgtttaataaatgttaattttatattttaggtgaatttgtgattggttttttgtttttttgggaggagagatataggtattataaattttatttgtttatgtggtttgtatttttttttttttttgtttagtaaaatgtttttttaaaaagttttaattttgttttagttgaattgatgggtaaatgtgattttttatatttgagttaggggatttaggtttttagattgttttgagagttgtgttgtagaggtttggttagaatttttagagtagtttcggatttttttttttgttatttttttatatttaattagaattttatgtttttcgagttgattttgttgtaaatttgtgtttttttttatttgtatgggttttgtcgaaatttagaagtttagttttttttatgattataggggtttcgggtaggttttttgttttgttaaggttaaaatttttatttttttaaatttaattattgattttttatttttattttatttgattagttatatttgatatagttgattatttttttttttaaatatttttatatggtttttgggattttttgttttttttttatttttttggttatttttttttagatttttttgttggtttgtttttatttttttttaatttttatatgttgatatgttagagtattttaaatttttagattttatttttgttattcgtgtttttatggtgattttatttagtttttggttttaaatatagagtgattatttttgtatttgttgtttttttttttttggagttttttttgttttttgtaggtaggaagtgattcgagataagagagggagagaatttttttggttaggatagagggtgattttgagaaggttttaaggaagaagtgagtatttgagtacggttatttgaggaaggttaggttatggatattagggtgtaggtaggagtagagtaaatatgtttgtaaaaggaatagtaattattttgttttatatttatattagtttatggtggtttttatagtagagtggtttgattttttattttttttaggtttttgtttaaagattaatttttttatgaggttttttatgaatataatttttaaaaatataaattttttttttattgggatttttttagtttttattttgagattttttattttttttttcgattttatttttttttataggatgtgtattattatttgatttattagttatttattatatattagtttattttttttttattagaatgtaaattttttgagggtagggattttgtttgttgagtttagttttgtatttttagtatttaaaatagtgtttgtttataataggtatgttaaatattgttggatagatgaatgagtgaatgaaaaatggtagtatttttttttttttagtttattttatataaagaggtaagattaatttttttaaatgcgtgagtattaggaagtgggagggattggaggaggaaattataataaggaatttataaattatttaagtttataaaataaaggtaggaaatatttaagataagagattttttttggttaggatagaggttggttttgagaaggttttaaggaataggtagatattttagtaaggttgttgaggaaggataggttgtggaaattaggatgtaggtaggaggattatagagtaaatattttaaggtgggaaatgtaagtgtgtgtagaaggaatagtaagtattgttgggttgggttggtttatgaagttgtgacgggttgagggagagataggattggaaaagtacgttggggttaggttgtagaggtttttgattgatagagaggggagtttggtttgtggggaattttttgttttgtgtggttagaggttggtttgatttttcggttttgttttagtttttttattttttatttagtttcggttggttcggtaaaaacggcgcgaatttcgttttttttgggtaattagggtttttattgtttggttagtggtgtttttcgcgtttttattggtattattaatgaatgaagtttggtttttattcgcggggaagggaggagttttaatttcgggttttttgtttttttgtagtatttttgttcgggtttcgtttcggggtcgttaggttttgaattttaacgtcggtattagtcgcgtttgcgtacggttttgtggagtcgcggaggtaagggacggagaacggggcggaggcggagttagggcgttcgcgcgtgggtttcgtttttttatgtcgggtataaagtttttttcgtttatagtttttttagttttcgaaggttcggaagttcgttattatgtcgtgcgagtcgtttatggttttcgggtattgggatattcgtggggtgagtgtcgttttaacggtagagtcgttcggttaaagagattgacgcggagagggcgggtttttgggttcgcgatttttagtaggagtagttttacgcgggagttttttcgagttgtcgagttacggatgtcgatttttgtttagtttttgggatcgcgggttttgtggggaggggcggaggagattacgtcggagtcgggtttaggggtcgtttaattatcgtttcggtaggacgtagggattcggtagtttcgggtcggggaacgttagcgggcgggggttgggaatgggtgggagttgcgtagtcgttgaatcgttgttttttttagt

SEQ ID NO: 84 - DNA, 5297 bp, Artificial Sequence
  chemically treated genomic DNA (Homo sapiens)
gttggggaagatagcggtttagcgattgcgtagtttttatttatttttaattttcgttcgttaacgtttttcggttcggggttgtcgagtttttgcgttttgtcggggcggtggttaagcggtttttaggttcggtttcggcgtggtttttttcgtttttttttatagggttcgcgattttagaggttgggtaggggtcgatattcgtggttcggtagttcgaaaaggttttcgcgtagagttgtttttgttggagatcgcggatttagagattcgtttttttcgcgttagtttttttgatcgagcggttttatcgttgagacggtatttattttacgaatattttagtattcgagaattatagacgattcgtacgatatggtgacgggttttcgagttttcgaggattagggaaattgtgagcgggaggggttttatattcgatataagggggcggggtttacgcgcgggcgttttgatttcgttttcgtttcgtttttcgttttttgttttcgcggttttatagggtcgtgcgtaggcgcgattaatgtcggcgttggggtttagggtttggcgatttcgaggcgggattcgggtaggagtgttgtaggagagtaaaggattcgaggttgaggtttttttttttttcgcgggtgggagttagattttatttattaatggtgttagtgaagacgcgaaaagtattattagttaggtagtggggattttagttatttagggagagcgagattcgcgtcgtttttatcgagttagtcggggttggatgaaggataggaagattggggtaaggtcggagagttagattagtttttgattatatagagtagaagattttttatagattaagtttttttttttgttagttaaggatttttgtaatttgattttaacgtgtttttttagttttgttttttttttagttcgttataattttataagttagtttaatttaataatatttgttgttttttttatatatatttgtattttttattttggagtgtttgttttgtgatttttttatttgtattttaatttttatagtttatttttttttagtagttttgttgaaatgtttgtttattttttgaagtttttttagaattaatttttattttggttagaagaggttttttattttgaatgttttttatttttgttttatgggtttaagtaatttatggattttttattataatttttttttttaattttttttattttttaatgtttacgtatttagggaaattaattttgtttttttgtgtaggatggattggaggaggaaaggtattattattttttatttatttatttatttgtttaataatgtttaatatgtttgttatggataggtattgttttaggtgttggggatatagaattgaatttaatagataaaatttttgtttttaggaagtttatattttaatggggaagaaataaattaatatatagtaaatagttagtaagttaggtggtgatatatattttatggagagaaataaaatcgagaagagagatagggggttttagggtgggaattgggggagttttagtaggaaggggatttatgtttttaaaggttatgtttatagaaggttttatggagaagttaatttttaaataaagatttgaaggaggtgagagattaagttattttgttgtgggggttattatgggttgatataaatataaaatagaataattgttgttttttttataagtatgtttgttttgtttttgtttgtattttaatgtttatggtttagttttttttaagtagtcgtgtttaaatgtttattttttttttgaagtttttttagaattattttttattttggttagaagagtttttttttttttttatttcgaattattttttatttgtaggaggtagagagaattttaggaaaagggaaatagtaagtataggagtgattattttgtgtttgaaattagagattagatgagattattatgggagtacgagtagtagagatgaggtttaagggtttgaggtgttttggtatattaatatgtaaaggttagggaaaaatgagagtaaattagtaaaggagtttgaaaaggagtggttagggaggtaggaggaaaataaaaggttttagaagttatgtgaagatgtttaaagggagaagtgattaattatgttaagtgtggttgattaagtaagatgaagatggagaattaatggttgaatttaggaaagtaggggttttgattttgatagagtaagagatttgttcgaggtttttatagttatgggaagaattaagtttttgaatttcggtagggtttatgtaaatgaaaaggggtatagatttgtaatagggttaattcgggagatataggattttagttgaatgtggaggagtgatagaggaaggagttcggagttgttttgagggttttggttaggtttttgtagtatagtttttagggtagtttgagagtttagattttttagtttaggtgtgggaaattatatttgtttattagtttaattgaagtaaggttgggattttttaaaagggtattttgttaaatagaagaaaggaagagtataaattatatggataggtgaaatttataatgtttgtgtttttttttttaagaaagtaaaaggttagttataaatttatttgaggtataagattaatatttattgagtatttattatatgttaggtaatatttaagtgtttacgtatgttagttaatttattttaatttaagttttataataattttaggaagtaggtgttatgtttatttttttttttttttttttttttttttttgtagtttttgtattatttttttttttttaaattttattattattatattttaagttttagggtataggtgtataacgtgtaggtttgttatatatgtatatatgtgttatgttggtgtgttgtatttattaattttttatttaatattaggtatattttttaatgttattttttttttttttttttattttataatagtttttggagtgtgatgtttttttttttgtgtttatgtgtttttattgtttagtttttatttatgagtgagaatatgcggtgtttggttttttgtttttgcgatagtttgttgagaatgatggtttttagttttatttatgtttttataaaggatatgaatttattattttttatggttggatagtattttatggtgtatatgtgttatgtttttttaatttagtttatcgttgttggatatttgggttggttttaagtttttgttattgtgaatagtgtcgtaataaatatacgtgtgtatgtgtttttatagtagtatgatttataattttttgggtatatatttagtaatgggatggttgggttaaatggtatttttagttttagatttttgaggaatcgttatattgatttttataatgttgaattagtttatagttttattaaaagtgtaaaagtgtttttatttttttatattttttttagtatttcgttttttgattttttaatgattgttattttaattggtgtgagatggtaatttattgtggttttgatttgtatttttttgatggttagtgatggtgagtatttttttatgtgttttttggttgtataaatgtttttttttgagaagtgtttgtttatatgttttgattattttaggggggaaggggggggtggtttttttttaattttttatttggttttatttatatgtagattggtttattttatagagagttgattggtttattttatagagtgttgattggttcgttttatagagtgttgattggtttgtttttatagagtgttgattggtgcgtttataaatttttagttagatatagagcgttgatttgtgtatttataattttttagttaggtagaaaagttttttaagtttttatttgatttagaagtttagttagttttattttttattttgattaggagttaagatagtggttttgttaaatatacgggttttgttttttgtttgaattttttagtgttatttattttttaagttattttttatattgttattagagtgatttttaaattttaaagtcgtgttaaataaaatttttaaattaattttttattaatttatttatagaattttgattttttagggtatgaatttattttttagatagtaatggttatttttagaattttttttatttttgatttatgatttgtgttttgggttattttttttagtggtttatattatttgtttgttttaggaatatataaattatgaggaaaataagtgtaaaataaaggagtaatggtatttgaaattttggtgtttttcgagtgtttttttgatatatattgagattagcgaatttttttaatagatagtttaggggtagttagaggttttttttttttttttttttttttatttattttttgaatatttttttatttttttagaaattatttaatgtttattgtatttttttgttgtttaattaggaggaaatttttatttttttttttgagtttttttagttttttgtatttttgattttgtttatatttggtttagagtttattaggtgtttaggtgtttttggggttgatttagaggttgttgggaggttagtggggatagatttagggatagtgttatatttcgttttgttattttattattttagaaagattttagttatttagttggagtttaataaatgttgatgtatttagttgaagtttggatagtgatttagttttagttgtggggaagatgattgtttgttcgcggttagttggggttatgtataaaattgggaggtcgtatttgtgtagggagtttgtgtttgagggtgttgatagttgttttttgttttaggagaaattgaaattagaatatttgtaggtattttttgaaatgttgaagttttatttatagtttttggggaagtagttatggttttttggggataaggtaatgggggcgtgtgatggggatattatagatttgttatattttttatattatggaggttttagtttatatatttttggttttatttagattatttttgtggattttatcgtttatgatgtttttgagagaaattaagtatttgagtttagttgtttggatgtttttttaaatttgaaggattttatttttcgatttgaggtgatgtttttagttttttttttttttatgttttttattttttttttttttttgtgatgtttttttagttttggagttatataa

SEQ ID NO: 85 - DNA, 5586 bp, Artificial Sequence
  chemically treated genomic DNA (Homo sapiens)
tgtttgattttgttttttaatttggaatttttatttatttttttaataatgataacgatatttattttattggtattgttattaaggaattttgtaaagtttgttttttatttaaaaattttattgtttttattatttacggtttttaggaaaaatagagagaattaatgaaatttgatagttaagatgaataaagtttttttaaattttaatggtttaaaatttttttttttttagttggaattatagagggtgttaaagagaagaagaagaaggtttttgttgtgttagaaattttttagaaaaagaaaaggaattttgtagagttaaagattaagtgtttgagaaataagtttgtttaaaagatgttttaaaaggtaaggaggaaatttatttgtgaaaaagcgaataggtagatgtatagaattgaaatttgaatagtgaggggggtaagaaaagttggtaatttttatgtacgtgtagaatttaaattggtatttgttatcgggattagaggtattaatggtgtgaatttaaaggtttaaaaggtgttgtagttttttcgtttttgttaaatttttaatggaaattttgtgaagtttaatagggttttagttaatatgttgaggattgtagagttatatattgtatgcgggtatttaaatttgaagttagtaaatgaattaggttataagcgtggttatggtaaaattaataagaaaagaattgttttgatagataacgttttgattgtttgattttttggtaaatatggtattatttgtatggaggatttgatttaagggatttatattgttggaaaagtttgtaaaaaaataaataattttttgtggttttttaaattattttatttacgaggtggaatgaagaaaaaggttatttattttgtagaaggtggagatgttggtaatagggaggattagattaataggtttattagaagaatgaattaaggtgttttttatgattatttttttaagttggttagttaataaatagtatttgtttttaaattgaaaaaataaaaataaaataaaattttatttttagttttagtgtgtataagattagttttttttgggatttataggttatttttttatgaattaatacgaggttaagttgggtgcggtggttcgcgtttataattttagttatttaggaggttgaggtgggagattgtttgaagttaagagtttgaggttgtagtgtattatgattgtatttgtgaagagttattgtattttagtttgggtaatatagtaatattttgtttttaaaaaaaagaaaaagaaaaagaaaaatggtttgtttatgtatttgaaaattttattattaatttttgatttggttttattataattatgatgaaatatgattaagaattgtaagggcgttatagaatatttttagttttattattaatagatatgatttttatttttaaataatttatttgtgatttataataagagatttagtgttttggaaaagatttgagattaattgtttttgattttcgaggaaatggattttattagatatttaataattgatttagtagtaatattttaaagtatggatttttaggtaaattattttttagtttaaaagatatataatatttttttttgatttttggatatttattttattggaaattttaaattgagatttttaggtatgttttagaagatgttgattttagaggtggatagtttttgtttagtattttggataaggattaataatttgatttaatatttttttttggttattattttattttgaagttatttaaaatattaatgttagttttttatttttattttattatttatttatttatttatttatttatttatttatttttatttaaaagttagggttttattttgttgtttaggttggagtatagtggtataattatggtttattgtagttttagatttttgggttttagtgatttttttattttagttttttaagtatttggtatgatgggtataagttattgtatttggtttttattttgttatttttgattttttatgttttttatttattatttaatagaaaataaaatttttttatattttttttttttaaattattgttgttattttgaatttaataattttgttgataaaaattttatagttgtttttttaaaatttttataaggtaatttttttttaattggttttttatggtaattatgttttatttatattatttattttaatttttagttttgtaataattgtgtttagatttcgtgttaataaattgtttttgttgaggttattataaggttaataaattaggattaatattgggtttattttggttattacggttgtttgttttttttagagatatttgagtttgttttgtagaaattatttaattttatttaaggaatttgtttattttgaggaatataaaagtgatttatttttattgtaataaatgatatttaatattagtataattagtgttttattaaaattttgttttttatatgatattaggattattttgtttattgttattttgtgattttaatgaattgttagagattgttagatatttaaaattattattttattaggaaattatgtttttttgaaaaagatatatagaagtgtttaggcgcgttggtttacgtttgtaattttagtattttgggaggtcgaggggggtagattatttgatatcggagttcgagattagtttgattaatatggagaaatagtgtttttattaaaaatataaaattagtcgggtatggtggcgtatgtttgtaattttagttattcgggaggtcgaggtaggagaattgtttgaattaggaaggcggaggttgtggtgagtcgagatcgtattattgtattttagtttgggtaataagattgaaattttatagaaagaaagaaagaaagaaaagaaagaaagaaagaaagaaagaaagaaagaaagaaagaaagaaaagaaagaaagaaagaaagaaagaaagaaagaaagaaagaaagaaagaaaggaaagaaagaaaagaaagaaagaaaggaaagaaagaaagaaagaaggaaggaaggaaggaaggaaggaaggaaggaagggaaggaaggaaggaaggaaggaaggaaggaaggaaggaaggatatttagaagtttttaaaatgaggaaagtatagataatttggtggattatttaggaaggataattgattttttttatataagatgtaatttttatagtaggaataaaataagatatatgtagtaaaatttgatagaattgaagggagaaatagatagttttatattaataatgggaggttttaaaattttttttttaattatggaaaggttgagacggaaggtaagtaaggaaatgtagaatgtgaatatataatgaatcggttagattttataggtatgtagaaaataatttgataatagcgtgtatatttttttttagggtattattttcgttttttttatttttattgttttcgatttttgtttatagatttatttttcgttttggtgtgattttcgtggttattgtggtttttattttggagattttgttggtttagtttttttcgtttttcgtagagtcgtatttttttttttgaagaagttatttgggatttgggtttcgtttttttggttttttagagtttttgtaatagtaggtatcgttttttttttttatatttaattttttttttattttattgttttttagtgtgtaaaaatagtaagaagtgtttcgtatttttaaaattttttttttgtagtttttatttgatttttagtcgtaggtggttaaagtatagtgtttttgaaggattgttttatttttagtgtttggaatatggtaggattttaataattgttgttttaataaaggaatgattaaatgggtgaatattaatgtaataatattaattttgttttttttataattatttttataagtgttagtttttttaaaaaattatttttataattggatttagatattttattttttttagtttaagatggataaatttagaatgataggttaggtatcgtggtttatgtttgtaattttagtattttgggaggcggaggcgggtggattatttgagattaggagtttaagattagtttggttaatacggtgaaattttatttttatagaaaatataaaaaagttagtagggcgtcgtggcgttcgtttgtaattttagttgttcgggaggttgaggtaggagaatcgtttgagttcgggaggcggaggttgtaatgaatcgagatcgttttattgtattttagtttgggtaatatagcgagttttcgttttaaaaaaaaaaaaaaaaaaaagatttagaatgatatatttttaatgttttaatgtataatgagaagtataattatttagaagtttaagtatttgtgtgtgtatggtgttatcgttttgttgtaggtaaatttatatgggaatttattttgatatataggttattttttgagtttggatttagttttagagttggggaattggtttaatgtaaaagggtcgggagtatttgtaatagagattgagttttattagtttcggtgatatagtttttatttacgttttttaatttagtagagagagtatattattagatttttaagatttagtagttaagaagtgttgaattaaattttttgagatttttttttagtttgattttggtagttttagttttttagagtttgtgggaattcggtagtcgagaggtagaaggttgggcgacgttcggagaagaagaaacgggggaagaattttttttttacgatttggttttatttttacgcgtatagtcgagtttttggggatttagtagaggttcgaagcggagcggggcggggcggggttacggaagttggcgaggtcgagttttttttagtgttttcggattttgttttttgaatattcggaggtggcggtggattttattttttttagttagtgaggatttagtaatttgtttcgtgtttttcgcgtttgttggttggaagtgacgattttgaagatcggtcggttggaagtgacgattttgaagatcggcgggcgtagcggggtcgagggggcgggtttggcgttaggtttagtttttgcgtgtcgggaattttagaggaggtcgtagtttagtttagttgaggtttgtttgtagaatcgatattaattagtattatgtttatgatattggggtattgggatattcgcggggtgagtgagggttcgttgtattgtgggatcgggcgcgtgggcgggaagtgtcgagcggttggggatcggttttagggacggttttttttttagggttattttttataggagggtttgtgtatgtttgtgtgtgtgtgtgtgtgtgtgtgtgtgtgtgtgtgtgtgcgtgcgtcggggtggggggggggtgtagtgtagtgtagattaggggtttatttggtgtagagaaagttattaagttagggattttttatttttgatacgatttgcgggttattttttttagt

SEQ ID NO: 86 - DNA, 5586 bp, Artificial Sequence
  chemically treated genomic DNA (Homo sapiens)
gttggaagagatggttcgtaggtcgtgttagagatggagggtttttgatttggtgattttttttgtattaggtgagtttttagtttatattgtattgtattttttttttatttcggcgtacgtatatatatatatatatatatatatatatatatatatataggtatgtataggtttttttgtgagagatagttttaaggagggaatcgtttttagagtcggtttttagtcgttcggtatttttcgtttacgcgttcggttttatagtgtagcggatttttatttatttcgcggatgttttagtattttagtgttatggatatgatgttggttggtgtcgattttgtagataggttttagttgggttgaattgcgattttttttggggttttcggtacgtaggggttggatttagcgttagattcgttttttcggtttcgttgcgttcgtcgatttttaaggtcgttatttttaatcggtcgatttttaaggtcgttatttttaattaataggcgcgggaggtacggagtaggttgttggatttttattggttggaaggagtaagatttatcgttattttcgagtgtttagggagtaaggttcggaagtattaggaggggttcggtttcgttagttttcgtagtttcgtttcgtttcgtttcgtttcggatttttgttgggtttttagggattcggttgtgcgcgtgagagtaaagttagatcgtaagagaaaagtttttttttcgttttttttttttcggacgtcgtttagttttttgtttttcggttgtcgagtttttataggttttgggagattgaggttgttagggttagattaaagagaggttttagagagtttaatttaatattttttggttattaagttttagaagtttgatggtgtgttttttttgttgagttggggagcgtgaatggaggttatgttatcgaagttgatagagtttagtttttgttgtagatgttttcgatttttttgtattgggttagttttttagttttgagattgggtttaggtttaggaagtggtttatgtgttaaggtggatttttatgtaggtttgtttatagtaagacgatagtattatgtatatataagtgtttggatttttgaatagttatattttttattatatattaagatattaagaatgtgttattttgagttttttttttttttttttttttggaacggggattcgttgtgttgtttaggttggagtgtagtagggcgatttcggtttattgtaattttcgtttttcgggtttaagcgatttttttgttttagtttttcgagtagttgggattatagacgagcgttacgacgttttgttaatttttttgtattttttgtagagatgggattttatcgtgttgattagattggttttgaatttttggttttaagtgatttattcgttttcgttttttaaagtgttgggattataggtatgagttacggtgtttggtttgttattttgagtttatttattttgagttgggaaagataaaatgtttaggtttaattgtgaagatgattttttaagaaagttaatatttatgagaataattatgaaagaaatagaattgatattgttatattagtatttatttatttggttatttttttattgaaataatagttgttgagattttattatattttaggtattgggaataaaataattttttaaaaatattgtattttggttatttacgattagaagttaggtgggaattataggggagagattttgaaaatacgggatattttttattgtttttgtatattgagaggtagtggagtgggagaggggttgagtgtaggagagagaagcggtgtttgttgttgtaaggattttgaggagttaggaagacggggtttaggttttaggtggtttttttagaaggaggagtacggttttgcggaaggcgggaagaattggattagtaggatttttaaagtaggggttatagtggttacgaggattatattagggcgggaagtgggtttgtggatagggatcgggagtagtggggatgagggaggcggaagtggtgttttggggaagaatgtgtacgttgttgttaggttattttttgtatgtttgtgagatttaatcggtttattgtgtgtttatattttgtatttttttatttatttttcgttttagtttttttataattgaaagaggggttttagagttttttattgttaatgtagaattgtttatttttttttttaattttgttaaattttgttgtatatattttgttttatttttattatgggaattgtattttgtatgagagaaattaattattttttttggatggtttattagattatttgtgttttttttattttagaagtttttgggtatttttttttttttttttttttttttttttttttttttttttttttttttttttttttttttttttttttttttttttttttttttttttttttttttttttttttttttttttttttttttttttttttttttttttttttttttttttttttttttttttttttttttttttttttttttttttttttttttttttttttttttttttttttttttttttttttttttttttttttatggagttttaattttgttgtttaggttggagtgtaatggtgcgatttcggtttattataattttcgtttttttggtttaagtaatttttttgtttcggtttttcgagtagttgagattataggtatgcgttattatgttcggttaattttgtatttttagtagagatattgtttttttatgttggttaagttggtttcgaatttcgatgttaggtgatttgtttttttcggttttttaaagtgttgggattataggcgtgagttaacgcgtttgggtatttttgtatattttttttaagaaaatatgattttttggtgggatgatagttttaaatatttggtaatttttaataatttattggaattatagggtagtagtggatagaatgattttgatgttatgtaagaaataggattttagtggagtattgattatattggtattaagtattatttattataataggaatgagttatttttgtgttttttaagatggatagattttttgagtggaattaaatagtttttgtaaagtaggtttagatgtttttgaagaaagtaaataatcgtggtagttagaatagatttaatattagttttgatttattggttttgtaatggttttagtagaagtaatttgttggtacgaagtttaagtataattgttgtaagattgaaggttgggatgaatgatgtgagtgaaatataattattataaggagttagttaaagggaggttgttttgtgaaggttttaaaaggatagttatgaaatttttgttagtagggttgttagatttagagtggtagtaatggtttgggaaaaaaaagtataagaaaattttgttttttgttaagtggtagatagagaatataagaggttagaagtaataggatgagggttaggtatagtggtttgtgtttattatattaggtatttgggaaattgaggtgggagaattattagagtttaggagtttgaggttgtagtgagttatgattgtgttattgtattttagtttgagtaatagagtgagattttggtttttaaataaaaataaataaataaataaataaataaataaataaataataggatgaaaataggaagttaatattaatattttagatggttttagagtagaataatagttaggaaagggtgttgagttagattgttaatttttatttaaagtgttgggtagaagttatttatttttgaagttagtattttttggagtatatttaagaattttagtttaagatttttagtggaatgggtgtttaagagttaggaggaaatattgtatgttttttgagttaggaaataatttatttaaggatttatattttggaatattattgttgggttagttgttaagtatttgataaggtttattttttcgaggattaaaggtagttaattttaggttttttttagaatattaaattttttgttgtgaattataggtgagttgtttggaaatgaagattatatttgttgatgataaagttgaaggtattttatgacgtttttgtaatttttaattatattttattataattgtaataggattaaattaaagattggtggtgaaatttttaaatatatggataggttattttttttttttttttttttttttttagagatagggtgttgttatgttgtttaggttggagtgtagtagttttttataggtgtaattatagtgtattatagttttaaatttttggttttaagtaattttttattttagttttttgaatagttaagattatagacgcgagttatcgtatttagtttggtttcgtattaatttataaggaggtaatttgtgggttttagaaggggttgattttatatatattgaagttagaggtaagattttattttatttttatttttttaatttgagagtaggtattgtttattaattgattagtttagaaaaataattatggaagatattttagtttatttttttaataagtttgttgatttggttttttttgttgttagtatttttattttttataaaatgggtggtttttttttttattttatttcgtggataagataatttgaagggttataggaagttatttgtttttttgtagatttttttaatagtatagattttttgaattagattttttatgtagataatgttatatttattaagagattaagtaattaaagcgttgtttgttaaagtaattttttttttattgattttgttataattacgtttgtagtttagtttatttattgattttagatttgggtattcgtatgtaatatatggttttataatttttagtatgttaattgaagttttgttaagttttataaagtttttattgaagatttgataaaggcgaagaagttgtaatattttttggatttttgggtttatattattgatatttttgatttcgatgataaatgttaatttgggttttgtacgtatatagaagttgttagttttttttgttttttttattatttaaattttagttttgtatatttgtttattcgtttttttatagataagttttttttttgttttttgaagtattttttgggtaaatttattttttaggtatttgatttttagttttgtaaaattttttttttttttttgaagggtttttggtatagtaggaatttttttttttttttttttgatattttttatggttttagttggaaaagagaagattttagattattggagtttaagggagttttgtttattttagttgttaaattttattagttttttttgttttttttgaggatcgtggatgataaggatagtaaagtttttgggtaaaaggtaaattttatagagttttttaataataatattagtaaaatgagtgtcgttgttattattagagaaataagtggaaattttaggttggaaaataaaattaagta

SEQ ID NO: 87 - DNA, 5364 bp, Artificial Sequence
  chemically treated genomic DNA (Homo sapiens)
gatttcgtttataataggttttatttaataattttattttttatattttttgttttattagtttttttttatattgatttgtttgttatataaaattatttttattgggtttatgtgtttttttttttatttattcgattttttatttggatgaatgtttttgcggaaatttatattaacgatagtgtgtagatgtttggagttatagatgattattgttttgtttaattaggagaagaaggtattgtatttaatgttattatgggttataaatatttttttttgtgtttcggatatgtaattcgttgtatttatttagaaatttaagtttgggttgtttattttttggagagattagttataggaaaatggggatatttggttttcggtttttttttttgttttttaagataaatgaaaaggggagtaataggagatattttatatttttaatataaatttgtaggaaaattatgttttaaaaattttgagggtttatttaaaattttaatttggggagattgtgttaatttatatgtagtagtattaaaaaatgatttatatgttttagtaatagattgggtattaaagggttatttaaaaaatatttgtttttttgggggaggggaatttttggaggttatttattttattttttattgggaggacgaggattattattttattttgtataggtggttcggtttattttttattttaaaatgggaagataaggatattattttttatttttaaggttttgtatgatattttttattttgagtttagaatatttagaattttcgaaattggttattgttatgtttggattgttagtatttgtgattttgaattttatgataaattttttttgaattttttttttttttttgatgtcgatttttttttacgggattttaattggtattacgataatttttatcgatttaggtatgtttttttatttttttagtatttttaggtatttcggtttgtttttttatggtggagaatatcgggtattgttatcgtcgttttttttttttagtattaatatagatttaagtattttgttttgtttatttttaatttgattatttttatatagagttgtgttaagtttttttatatgttgttagtggtaaatattaaaatttggataaataattaaattgtttaatgtattgttatttatatatttgtgttgattttcgttttgattttaggaaaagtgtaatgttggttggagttcgagaaggaatttggatattgtgtgtcggattagttaaagaattttgtgttaaaatcgagagaacgaataagtttttattattatggtatatttatataaaaagaaagggagagatgttgcgggaagttagggatttcgaatggagggattgattggagtcgcggtagaggaatataaattgtaaatattttattttaatatggatatttattagtttttaaattattattttttatattttttacgtttgttttattttaattttttaattttgttatttttataagttgaggatatatgttattttaggattattgtgataattgtgttaattgtataaattgattgtaaaatatgtgtgtttgtataatatgaaattagtgtattttgaagaagaatagaataatagtgatttttaggtaataagagaagataattataaggtttgattgcgtgtagggttaggtaaaatagagttatatttttttttttgtagggagtttataaatggatatggaagtagggaagatattgttaaattttttttttagtaaggaatattattattaatattttgggaaaggaatgtatttttggggggaggtttataaacggtcgttttgggaatgtttgttttatgtagttgagataaggattgaagtatattttggttttttgtagtatttttaggtttattagggtggggaaaaatttggttttggtaaatttgtggttagattggttttttgtttttgaattttgtgttttgttgtttaagatgtttattaagataatacgtgtattgttgaatatagatttttattaggagttttatttttgtttttgttttgtttttttagaagtatgtgatttttgttttgttttttgttttttaaagtatgtgatttttgtatttatttttcgttcgtatattttttttttttttgtaatttttaataaaagtttgttggttttgaggttcgggtcggtattacggttttattgatatgtgatgttatttttggcggtttagttgtaaaatttttttttttgtattttttttttttattttttagttagttgatatttatggaaaatagaatttatgttgaaatattgggggtagttttttcgatagttttgttgaggaaattaaatttatgtttaagtgttatttttttatggaattaaggaataagtattttaaataatattaatgtaatagtattggttttatgtgttttaaaattattatttttatgagtgttagtttttttaaaaaatcgtttttattaattggatttagatattttattttttatagtttaagatttattaatttaaaattataaatttttaatgtataatgagaaatataatgatttttagggttaggtatttgtgtttgtgttggtgttattgttttaatgtaggaaaatttatgtgagaatttattgtgaggttaaaattgttttttaaatatggatatttgttaggtatttgagttgggagtattgtttaggtttggatgggtggggagtgtttgtaataaggattgtgttttgttagttttagtgatatagtgtttaagtgttttaatttagtagttatttgttgattatttgatttttgtggtttaatagggatgtgatgaagtttatttgtttatttaattttaaattatatattatttaggtggtttgaaatttttttgatatattgggtttattttttggagttttaataatgttttagttaatttataaaaaaataaaaataaaaataaaaaataaaaaattattttttttgtagtataatagtttggtttatattgtaaaatgattttttattaaaggtttattatttatttttatatatttattattatttgtaatattttttaaaaaaagtagttaattttaggttaatttattgtataatttttttgaaagttttttttttattttgaaagaagaaagttggtaggttggatattgtttttgcggaggttgtattatgggttatatattacggtgtgattttaaaggttattggagttatcgttttatattgaagaatatatatgggttaggagttaggtttaggttcggtatggtggatttggagaggggagagtttttgtttgtgattttgtggggagtttttaggtttttttttggttattattttttgatttttttttttagtaggatagggttttggtttttttgagggataggttttgtggtagattaggtgttattaatataggtttttataataattgttttagtattgattgagtgatgaaattaaatattaaaagttgaaaaaagttagtatttttatatagaggttggatgtaataaaagtttattaagagttttgtttaggttttttttgggttttaaagtatgataaaataacgaaggaatttttaataggatttatttagaattaaataagttttattgtgagtttgaagaaattttttaggtttttataaataagtttattgggtatttgaaggaattttttaaatttttatgatttagtaggagataagataagggtaattatttttcgtatttggatttatttagattaagtaaatagattgaggttttagagtaaggtttttaggatttagattttagttatagattaaagaagttaattatttatgtttttagatgaatgtatatttatttgtagatatatattttagaaggtatatatgttttggaaaattttaattttgagttggtttggtagtaatttttaggttttttttttgtaattggttgtagaaataaaatttttttttttttttatttgatttgtatttcgttattgggtttagagaaatagtagtcggatttttagtttggttcgggaagtttttttattttttttcgtttgttttttgtggttattgtatttattgttgttgttgttgtttcggtttttgtgaggtttatttagtggattggttggatatttttagggggtattttagatattttattaatttgttggatttgatttttggatttcgatttataaattgtgttaaaatacgaagtggttaatttatatagtatttagttagatgatcgaaggatttagtatttaaaggtttttaatagaaaatatagattatattttttttattttggttttttttttgggggttttttttatattattgatattgtttttgtgtaggcggggttagaggggagattaagttttcggagtagttttcggattagaggaagttttgtttttatagtgataggggttgaattaaatttttaggttgggattattattttttagtttgatttttgtagtcggagttttttagagtttttgggaattcggtagcggagagaaggttgagggattttgcgggtagggaggagaagggagaagagttttgtttcgttaggatttggttggtgttttaagcgtatagttaagtcgttgtggatttagtaagggttggatggatttatggagttttagggcgggttggggaagttggcgaggtcgagtttcgttttgggtttttgggcgttttgatttcgttttcggaattttggggattgggaggcgggagggggtttattgattttagtttcgggcgttcgttcgggggtttatagaatggcgtgtttcggggttgtggcgggtcgaggggcggggtcgtagtaaggtttcgtttgtttttttttgggttttttaaagtttgagtttcgtttcgttgatgtttgtttgtagaattcgtattaattagtattatgtttatgattttggggtattgggatattcgtggggtaagcgagggttttttggtgggtgggatagggggcggaggcggggatgtgtggagtagttgtaggattggttttagggatcgtttttttttagggttgttcgttttagaagggtttgtgtatgacgttgtgtgtgtgtttgggggtgggggcgggtagaggaggcgacgggtacgtgtagtatagattaggggttggtttggtgtagagaaagttattaagttagggattttttatttttgattcgagtcgcgggttattttttttagt

SEQ ID NO: 88 - DNA, 5364 bp, Artificial Sequence
  chemically treated genomic DNA (Homo sapiens)
gttgggagagatggttcgcggttcgggttagagatggagggtttttgatttggtgattttttttgtattaggttagtttttagtttatattgtacgtattcgtcgttttttttattcgtttttatttttaaatatatatatagcgttatgtataggtttttttgaggcgggtagttttgaagaggaacggtttttagagttagttttgtagttattttatatattttcgttttcgttttttgttttatttattagaggattttcgtttattttacggatgttttagtattttagagttatgggtatggtgttggttggtgcggattttgtagataggtattagcggagcggggtttagattttgagaggtttaggaggggataggcggggttttgttgcgatttcgtttttcggttcgttataatttcgaaatacgttattttgtaggttttcgagcgagcgttcggggttggaattaataagttttttttcgttttttagtttttagggtttcgggagcgaggttagggcgtttagaagtttaaagcggggttcggtttcgttagtttttttaattcgttttgaggttttatgagtttatttagtttttgttaggtttatagcgatttggttgtgcgtttgagatattagttagattttaacggagtaaagtttttttttttttttttttttgttcgtagaattttttagtttttttttcgttgtcgagtttttaagggttttgggagatttcggttgtaggggttagattaaaaagtggtggttttaatttgggaatttaatttagtttttgttattgtaagagtaggattttttttgattcgaaagttatttcgagggtttagttttttttttagtttcgtttatataggaatagtgttagtggtataggaaggatttttaggaaaagggttagagtaaaggaaatgtggtttgtgttttttgttaggggtttttggatattgagtttttcggttatttggttaagtattatgtaaattagttatttcgtattttggtataatttatgaatcgaaatttaaggattagatttagtaagttggtgaggtatttgaggtgttttttagaaatgtttagttagtttattaggtgaattttatagagatcggaatagtaatagtaatagtgagtgtagtggttatagagagtaggcgagggaggatggaagaatttttcggattaaattgagggttcggttgttatttttttaggtttaataacgagatgtagattaaatggggaggaagagaggttttatttttgtaattagttatagggagaaggtttggaaattattattagattaatttaaaattaaagttttttagagtatatatattttttaaggtatatgtttataagtaagtgtgtatttatttaaagatataagtgattaatttttttaatttgtaattgaggtttgggttttgaggattttattttggagttttagtttatttatttaatttaaatgggtttaggtgcgggggatgattgtttttattttgttttttgttaaattatggaggtttggggagtttttttagatgtttagtaaatttgtttgtggaggtttggggagtttttttagatttataataaaatttgtttaattttaaataggttttgttaagaattttttcgttgttttgttatgttttaaggtttaggaaaggtttaagtaaaatttttggtgggtttttgttatatttagtttttgtataaaggtattggttttttttagtttttaatatttaattttattatttagttagtattgaaatagttgttatggaggtttgtgttagtgatatttggtttgttatagaatttgttttttagagaagttagaattttgttttgttgaggagggaggttagaggatggtggttagagaggagtttgagggttttttataggattataggtagggatttttttttttttagatttattatgtcggatttggatttggtttttgatttatgtgtgttttttagtatgagacggtggttttagtggtttttgaagttatatcgtgatatgtgatttatggtataattttcgtaagaataatgtttaatttgttaattttttttttttaaggtagaaggaagatttttaaaagagttgtgtaatggattagtttggggttgattgttttttttaaaggatattataaataataatggatatatggaaatagatgatagatttttaatgagaaattattttgtaatgtaaattaggttgttgtgttgtaaaaaaagtagttttttgttttttgtttttgtttttgtttttttgtaaattagttaaaatattgttaggattttagaggatgaatttagtatattaaaaaagttttaaattatttggataatgtgtggtttggggttgagtaaataggtagattttattatatttttattaggttatagaaattaggtggttagtaggtggttgttaagttggggtatttggatattgtgttattgaggttggtaaggtatagtttttgttgtaaatattttttatttatttagatttgggtagtatttttagtttagatatttggtaggtatttatgtttaggaagtagttttggttttatagtgaatttttatatagatttttttgtattgaggtaatagtattagtatagatataagtgtttggttttaggaattattatattttttattatgtattaagagtttatgattttgagttaatgggttttgagttgtgaaagataagatgtttagatttaattgataaaaacgattttttaagaaagttaatatttatgagaataataattttgaaatatatagaattagtattgttatattagtattgtttgaaatatttgttttttggttttataaagaaatagtatttgaatataaatttaatttttttagtaaggttatcggggaaattgtttttagtattttaatataggttttattttttataagtgttagttggttgagaaataaagagaaagagtataaagagaggaattttatagttgggtcgttaggggtgatattatatattagtaggatcgtgatgtcggttcgagttttaaaattagtaagtttttattaaggattgtaaaaggggagggggtgtacgaacggggggtaggtataaagattatatgttttaaggggtaaaaaatagaatagagattatatgtttttgaggaaataggataagggtaaaagtagaatttttgataagggtttatgtttagtagtgtacgtattgttttgataaatattttaaataatagaatatagggtttaagagtagagaattagtttgattatagatttgttagggttaggtttttttttattttagtaagtttgagggtattgtaggagattagggtgtattttagtttttgttttaattgtataggatagatatttttagagcggtcgtttatagatttttttttaggaatgtattttttttttagagtattaatagtaatattttttgttaggaaaagaatttagtaatattttttttatttttatgtttatttataggttttttgtaagaagaaaaatatggttttattttgtttgattttgtacgtagttagattttatggttgtttttttttgttgtttaaaaattattgttattttgtttttttttaaggtgtattgattttatattgtgtaaatatatatgttttataattaatttgtatagttaatataattattatagtggttttgaggtgatatatatttttagtttatgaagataataggattaagagattaaagtaagataggcgtaagaaatgtaaaaagtaataatttgggaattgataaatgtttatattaaaatgaaatatttgtaatttatgtttttttgtcgcggttttagttagtttttttattcggggtttttgatttttcgtaatatttttttttttttttttatataaatgtgttatggtgatgaaggtttattcgttttttcggttttgatataggattttttggttggttcggtatatagtatttagattttttttcgagttttaattaatattatattttttttggagttaaaacgggagttaatataagtgtataaatgataatgtattggatagtttgattgtttgtttaaattttgatatttgttattaatagtatgtaaggaagtttaatataattttgtataggaatagttaggttggaggtaaataaagtagaatgtttgaatttatgttgatattgagggagaggagcggcggtggtaatgttcgatgttttttattataaagaagtaaatcgaggtgtttggggatgttgaagaagtagaggggtatatttgggtcgataagaattatcgtaatgttaattggagtttcgtaaaggaggatcggtattaaaaagaggaaaaaggtttaaaggggatttattatggggtttagaattatagatattggtagtttagatatgataatagttaatttcgaaagttttgggtgttttgggtttagaatggggaatattatataaggttttgggggtggagggtaatgtttttatttttttattttaaggtaaagaatgagtcgaattatttatgtaaagtaggatgatgattttcgtttttttaataagaaataaaataagtagtttttaggaattttttttttttagaggagtaagtgttttttaaatagttttttggtgtttagtttattattaaagtatatgagttattttttaatattattgtatgtgagttaatataatttttttaaattaaagttttagatgggtttttaaaatttttaggatatagtttttttataggtttatattgaaagtatggggtattttttattatttttttttttatttgttttaaaggataaagggagaggtcggagattaaatgtttttatttttttgtagttaatttttttagaagataagtagtttagatttgagtttttagatggatataacgagttgtatgttcgaggtatagaggagggtatttataatttatagtaatattaaatgtagtgttttttttttttggttgagtagggtaatggttatttatagttttaggtatttatatattatcgttagtgtagattttcgtaggagtatttatttaggtgagaggtcgaataagtggaggaaaaggtatataagtttaataagaataattttgtgtagtaggtaaattagtgtgaggggaaattggtgagatagaaagtataaggagtagaattattaaataaaatttattgtaagcgagatt

SEQ ID NO: 89 - DNA, 5649 bp, Artificial Sequence
  chemically treated genomic DNA (Homo sapiens)
cggtggtttatatttgtaattttagtattttgggaggttgaggtaggcggattataaggttaggagatcgagattattttggttaatatagtgaaatttcgtttttattaaaaatataaaaaattagtcgggtgtggtggcgggcgtttgtagttttagttattttggaggttgaggaaggagaatggcgtgaattcgggaggtggagtttgtagtgagttaagatcgtgttattgtattttagtttgggcgatagagttagattttattttaaaaaaaaaaaaagaaaaaagaaaatattttaagttttgaggattatatagtttttgttgtaattatttatttgggttattgtagtataaaaataaatatagataatatatatatgagtgagtatggttggggtttaataaaattttatttatataagtaggtgatgaattacggtttatagtgttttaatttttgatttagatggtgaattattatgagttttcgttgtttttttcggtagaaatatgggagaaattatagagagaaatagagattttaggaaaatagtaaaattaaataaataaagtgagacgtcgttttttttggaggttgtaggttgtgttgaatttgtgtgtgtttgggtgtatagggatgtgagtagatgcgcgtggagatgtgtgtgtgggtggagattgagcgtggttggaggtggttgtggtaggatgttagaaggaaggagtttgtatttagtttttttattagtattttttggagttgttgaggggatgttattgttgaatattgattttggtgtaggttaaatcgaagttagtttttgttattttttgttgggtgaggtattggggagaatagtgggattgaatggggcgggtttttttttttttatattttttttggaaatatttagtattagtatattagaatatggggagttattttttttagcgttgttttttaaggttcggaaggggaaattttgattttaagttttgtttgaagagcgatagtaaaggggagaggttggttgtggtttggtggtgtttattttttttttttgttttgaaattataggttggtatattattcgagagaatgattagtgttattaagggaagggtataagtttattggttttaggggagatattttaggggataggaatattttttgacgttgaatgagtgtagtatatagacggagaatatatataagagaaattatgaggatatgagagaaggtattggtaataggaagttataaaaagtaataaaaagaaagagtagatataaaaataataatcgaagaaagttaataatagatgggatgaattatacgaggtatgcgatttatggatgaagaggtgagtgatgagattagttggggaatttttttttaggaaagataaattagaagaaatataaatgatatcgaagtggttaggcgtagtggtttacgtttgtaattttagtattttgggagttcgaggtaggtggattatttgaggttaggagtttgagattagtttggttaatatgatgaaattttgtttttattaaaaatataaaaattagttaggtgtggtggtaggtatttgtgattttagttatttaggaggttgaggtaggagaattatttgaattaggaagtagagattgtagtgagttgagatggtgttagtgtattttagtttgggtagtagagtgatagtttgtttaaaaaaaaaaaaaggtagtaaagtgataggaggatagattagaagggttattttttagatagtgtaaggaagaaagaagaagaagaagaggaggaggaggaggaagaggaagaagacggagaagagggtattttagaagaaataatggagatatattttttaaaattgaagaaagatgattaattttagatcgaaggttaagaggtaaattagagagatagtttggtaagttaggaagagtattaaagttagataattagagtgaaattaaagaaaatttaaggtgataaaaatttaaaaagtttttttgtgattttagtttattggtgaaaatttaaaaaaaaaaaaaaaaaaaaaaggatagtttgggtaatatggtgaaattttatttttataaaaaatataaaaattagttgggtgtggtggtatatgtttgtagttttagttattcgagaggttaagtaaggtaggaggattatttggggttaagagttttagattagttgcggtaatatatatgttgtgggaagttaggtatttcgaacggagggattggttgaagttatggtagaagaatataaattgtgaagattttatggatatttattatttttttaattaatatttttgtgattttttatgtttgtttttaattttttaattttgttattttcgtaaattgaggatgtatgtcgttttaggattttgtgatgattgcgttaattgtataaattgtttgtagaggataattgttgtgtgtttgagtaatgtgaaatttgggtattttaagaataggataatagtaatttttagggaataagggagataattttaaagtttggttgtttgtgggttgggtaggatagagttatattttttttattatcgtaaataggtaagagaaatatcgttgaattttttttttagtaaggaatattaataattaatagttttgagaaaagaatgtatttttagggtcgggttattgaaatggtttttttgagagtgtttgtttttatttagaagtagaaagggatgaaatacgttttagttttttgtagtatttttagatttgataggattaggaaattttagtttggtaaattttagttagatcggttttttgtttttgaattttgatagtgcgtgttagtgggatttggaagtttattagtgattttagtttcgtcgtgattttttgttttgtgattttttgtcgtttttgaagtatgtgatttttgtgatttatattttgttcgtgtatttttttttttttgaaaattgttaataaaaattcgttggttttacggtttagggggtattacggaatttgcggatatgtgatgttttttttggatattcggttttaaaatgttttttttttgtattttttttttttattttttaggttagtcgatatttagggaaaataggaaaggatttacgtgaaatattgggggttgaatttttttcgataataagttttttaaaaaagatttttaaatgaaatttttttgttttttaatttttatttttgttttgggggtatatgtgaaggtttgttatataagtaaattcgtgttttcggtgtttgttgtatagaatattttattatttaggtattatgtcgagtatttaatagtttttttttttgtttttttttttttttttattttgtattttggagttaattatagtgtttgttgtttttttgtttgtgttataagtttttattatttagtttttatttataagtgagaatatttagtatttggatttttgtttttgtattagtttgttaaggataatagtttttagttttatttatgttttataaaagatatgatttagttttttttaatggttgtattaaatgaagttttaaagatataatataaatattaattttttttttattataaaaattttttgttgaatttgattatatttaaattaacgagttttgttttatgaaagattttttggataaatttgatagttgatggaataggagaagttgtttgttatgtttaaagttaataagagattaatatttagaataaatggagatttgtaaattaatagaaagtaggtagtaaagttaaagaaaatagtttaaggtatagttattaaaaggaacgtgattatgttttttgtagggatatgggtggagttggaagtcgttagttttagtaaatttatataggaatagaaaattagcgagatcgtatggttttatttataagtgggagttgaataatgagaatatatggttatatggcggcgattaatatatattggtgtttgttgagcggggtgttggggagggagagtattaggaagaatagttaagggatattgggtttaatatttgggtgatgggatgatttgtatagtaaattattatggcgtatatatttatgtaataaatttgtatattttttatatgtattttagaattttaaataaaagttggacggttaggcgtggtggtttacgtttgtaattttagtatttttgggaagtcgaggcgtgtagattatttaaggttaggagttcgagattagttcggttaatatggtgaaatttcgtttttattaaaaatataaaaattagttagatgtggtacgttatttataattttatttattcgggaggttgaagtagaattgtttgaattcgagagcggaggttgtagtgagtcgtcgagatcgcgttattgtattttagtttgggttatagcgtgagattacgttataaaataaaataaaataatataaaataaaataaaataaaataaaataaaataaaataaaataaaataaaataaaaaaataaaataaaataaaataaaataaaataaagtaatttttttttttttaagcggtttttattttttttttttgttttgtgaagcgggtgtgtaagtttcgggatcgtagcggttttagggaattttttttcgcgatgtttcggcgcgttagttcgttgcgtatatttcgttgcggttttttttttgttgtttgtttattttttaggtttcgttgggatttgggaaagagggaaaggttttttcggttagttgcgcggcgatttcggggattttagggcgtttttttgcggtcgacgttcggggtgtagcggtcgtcggggttggggtcggcgggagttcgcgggattttttagaagagcggtcggcgtcgtgatttagtattggggcggagcggggcgggattatttttataaggttcggaggtcgcgaggtttcgttggagtttcgtcgtcgtagttttcgttattagtgagtacgcgcggttcgcgttttcggggatggggtttagagtttttagtatggggttaattcgtagtattaggttcgggttttcggtaggtttttcgtttatttcgagattcgggacgggggtttaggggatttaggacgtttttagtgtcgttagcggtttttagggggttcggagcgtttcggggagggatgggatttcgggggcggggagggggggtagattgcgtttatcgcgttttggtattttttttcgggttttagtaaatttttttttgttcgttgtagtgtcgttttatatcgtggtttattttttagttcgaggtaggagtatgtgtttggtagggaagggaggtaggggttggggttgtagtttatagtttttcgtttattcggagagattcgaatttttttattttttcgtcgtgtggtttttatttcgggttttttttttgtttttcgtttttttcgttatgtttgtttttcgttttagtgttgtgtgaaattttcggaggaatttgtttttttgttttttttttgtatttttgattttttttcgggttgttgcgaggcggagtcggttcggtttttatatttcgtattttttttttttcgtagt

SEQ ID NO: 90 - DNA, 5649 bp, Artificial Sequence
  chemically treated genomic DNA (Homo sapiens)
gttgcggggagggagaagtacgagatgtggggatcgggtcgatttcgtttcgtagtaattcggggaggggttaggagtgtagggagggaatagggaaataggttttttcgaagattttatataatattggggcggggagtaggtatggcgggagaggcggggaataggaaggaggttcggggtaaaagttatacgacggagggataagggggttcggattttttcgggtgggcgaggggttgtgggttgtagttttagtttttgttttttttttttgttagatatatgtttttatttcgaattgggaaatagattacggtgtagggcggtattgtagcgaataaagaaaagtttgttggagttcgggggaggatgttaaggcgcggtgagcgtagtttgtttttttttttcgttttcggggttttattttttttcgaggcgtttcgggttttttgaaagtcgttaacggtattggggacgttttgggttttttaggttttcgtttcgggtttcgaggtgggcgaggagtttgtcgggagttcgggtttgatgttgcgggttggttttatgttgggagttttgagttttattttcggggacgcgggtcgcgcgtatttattggtggcgaagattgcggcggcgaaattttagcgaagtttcgcggttttcgagttttataagggtggtttcgtttcgtttcgttttagtgttgagttacggcgtcggtcgtttttttggagggtttcgcggattttcgtcggttttagtttcggcggtcgttgtatttcgggcgtcggtcgtagaggggcgttttggagttttcggagtcgtcgcgtagttggtcggggaagttttttttttttttttaggttttagcggggtttagggagtaaatagatagtaggaagaggatcgtagcgaagtgtgcgtagcgaattggcgcgtcgggatatcgcggggggaaattttttaagatcgttgcgatttcggagtttgtatattcgttttatagggtaggggagaggggtggaggtcgtttagaggaaaggaaattgttttattttattttattttattttattttatttttttattttattttattttattttattttattttattttattttattttattttgtgttattttattttattttatgacgtagttttacgttgtggtttaggttggagtgtagtggcgcgatttcggcggtttattgtaattttcgttttcgggtttaagtaattttgttttagtttttcgagtaggtggaattataggtggcgtgttatatttggttgatttttgtatttttagtagagacggggttttattatgttggtcgggttggtttcgaatttttgattttaggtgatttgtacgtttcggttttttaagagtgttgggattataggcgtgagttattacgtttggtcgtttaatttttatttgaagttttggggtatatgtagaggatgtgtaggtttgttatataggtgtgtgcgttatgatggtttgttgtatagattattttattatttaggtattaagtttagtattttttagttattttttttggtattttttttttttagtatttcgtttaataggtattagtgtgtgttgatcgtcgttatgtgattatgtgtttttattgtttagtttttatttataagtgagattatgcggtttcgttggttttttgtttttgtgtgagtttgttgaggttaacggtttttagttttatttatgtttttgtaaaggatatgattacgttttttttagtggttgtgttttaggttattttttttggttttgttgtttattttttgttgatttgtagatttttatttattttagatattgattttttgttggttttagatatgatagatagttttttttattttattaattgttaagtttgtttaaggagttttttatgaaataaaattcgttaatttaagtgtaattaaatttagtaagggatttttgtggtggggaagaggttggtgtttatgttgtatttttaaaattttatttaatgtagttattaaaaagaattagattatgttttttgtgggatatggatggagttagaggttattatttttagtaaattaatgtaggaatagaaatttaaatattggatgtttttatttgtaagtgggagttaaatgatgagaatttataatataaataaggaaataatagatattgtggttgattttagggtgtaggatgggaggaaggagaggagtagaaaagagaattattgggtattcggtataatatttgggtgatgaaatattttgtataataaatatcgaagatacgagtttatttatgtaataaatttttatatgtatttttaaaatagaaataaaagttaaaaaataaagaaattttatttaaaagttttttttaagagatttattatcgggggaaatttagtttttaatattttacgtgggtttttttttattttttttaagtgtcggttggtttgagaaataaagggaaagagtataaaagagagatattttaaagtcgggtgtttaggggagatattatatgttcgtaggtttcgtgatgttttttgagtcgtaaaattagcgagtttttattagtaatttttaaagaggagggagtgtacgaatagggtgtgggttatagagattatatattttaagggcgataaaagattatagggtagaaggttacggcgaaattagaattattaatgaatttttaggttttattggtacgtattgttagggtttaagagtagagaatcggtttgattagaatttgttaggttggaattttttaattttattaagtttgggggtgttgtaggagattagggcgtgttttatttttttttatttttgaataaaggtaggtatttttagggaggttattttagtggttcggttttgggaatgtattttttttttagggttgttaattattaatattttttattggggaaagaatttagcgatattttttttatttgtttgcggtaataagagaagtatggttttgttttgtttagtttataggtagttagattttaaggttattttttttgttttttgaaaattgttgttattttgtttttaagatgtttagattttatattgtttaaatatataataattgttttttataaataatttgtgtagttaacgtagttattatagggttttaaggcgatatatatttttagtttacgaagatgataggattaagagattaaagataggtataggaaattataagagtattgattggggaagtgataaatgtttatgaaatttttataatttatgtttttttgttatggttttagttagttttttcgttcggggtgtttgattttttataatatgtatgttgtcgtagttggtttggaatttttggttttaagtgatttttttgttttatttagtttttcgaatagttgggattataggtatgtgttattatatttagttaatttttgtattttttgtagagatggggttttattatgttgtttaggttgtttttttttttttttttttttttttaaatttttattaatggattgaggttataaggaagttttttaaatttttgttattttgggttttttttaattttattttaattgtttagttttggtgttttttttggtttgttaagttgtttttttggtttgttttttggttttcggtttgaggttggttatttttttttagttttgagaaatgtatttttattgttttttttgagatgttttttttttcgtttttttttttttttttttttttttttttttttttttttttttttttttttgtattatttggaaaatggtttttttaatttatttttttattattttattgtttttttttttttttagataggttgttattttattgtttaggttggagtgtattggtattattttagtttattgtaatttttgttttttggtttaagtgatttttttgttttagttttttgagtagttgggattataggtgtttgttattatatttggttaatttttgtatttttagtagagatagggttttattatgttggttaggttggttttaaatttttgattttaagtgatttatttgtttcgggtttttaaagtgttgggattataggcgtgagttattgcgtttggttatttcgatgttatttgtgttttttttggtttgttttttttgggagagagttttttagttgattttattatttatttttttatttatgagtcgtatatttcgtatgatttattttatttgttgttggtttttttcgattattgtttttatatttattttttttttttgttgttttttgtaattttttattgttagtgtttttttttatgtttttatgattttttttgtgtgtatttttcgtttgtgtgttgtatttatttagcgttaggggatgtttttgttttttgagatgttttttttggaattagtgagtttgtgttttttttttggtggtattggttattttttcgggtagtatgttagtttgtggttttaaagtaaaggaaggagataagtattattaaattatagttaattttttttttttgttatcgttttttaaatagagtttgaggttagagttttttttttcgaattttgggaagtagcgttggggaaggtggttttttatgttttaatgtgttggtgttgggtgtttttaggggaagtgtgggagggagaaagttcgttttatttagttttattgttttttttagtgttttatttagtagagggtagtagaggttaatttcggtttagtttgtattagggttagtgtttagtagtgatatttttttaataattttagagagtattaataaaggaattgaatgtaaattttttttttttggtattttattatagttatttttagttacgtttagtttttatttatatatatatttttacgcgtatttatttatatttttgtatatttagatatatataggtttaatatagtttgtagtttttaggaggggcgacgttttattttatttgtttaattttattgtttttttgaaatttttgtttttttttgtggttttttttatatttttatcggagagggtaacgaaagtttatgatagtttattatttaaattaaggattgggatattatggatcgtggtttattatttgtttgtgtaaataaagttttattgggttttagttatgtttatttatgtgtgtgttatttatgtttgtttttgtgttatagtggtttaaatgagtgattgtaatagagattatgtggtttttaaagtttaagatatttttttttttttttttttttttttgagatggagtttggttttgtcgtttaggttggagtgtagtggtacgattttggtttattgtaagttttatttttcgggtttacgttattttttttttttagtttttagagtagttgggattataggcgttcgttattatattcggttaattttttgtatttttagtagagacggggttttattgtgttagttaggatggtttcgattttttgattttgtgattcgtttgttttagttttttaaagtgttgggattataggtgtgagttatcg

SEQ ID NO: 91 - DNA, 7445 bp, Artificial Sequence
  chemically treated genomic DNA (Homo sapiens)
ttgaagatatatgtttagataaaaatttgtacgtgaatgtttattatagtatggggatttataatagttgaaaagtagaattaatgtaaaagtttattaattggtgaatggataaatagaatgtggtgtatatataaaatggaatataatttagttataggaagggatgaagtattgttatatgttatattatgaatgaattttgatattattatgttaaatgaaagaagttagttataaaagtttatatattttattattaaatttgaatgaaatgtttagaataggtagatatttattgtttatagaggtagaaagtagatgaatggttattaggggttaggagaagagggaaatggggagtgattgtttaatgggtatagagttttttttaggggtgatgaaaatgatttagaattagataattgtgatggtgataaaattttgttaatatattaaaaattaatgaattggttttaaattaattgaattttaaagtatattttgaaagagcggatattatggtatgtgaattatattttataatgaaaatatgattgtattgtttaaaagagtatgaaaggaagtatataaaaaatatgaaatataaaatatggttttttttattttaaagtgtagaaattgaatattttgttttaggatataaaataaaaataaagaaagttaaaagtttttttatttggttattttggagtaagatttattatagtttagtgttttttatttagttttatagtttagtttattgtttgcgtgaaattttgtagtttttatttttgtttgattgttgggtgtaaagttatgagtgattatattgggggaagggaggaaaattttttataaaagtatattttgggggtttgaggatagacgtgggtttagcgatagatgtgggtttaggtattagaacgtgatatgtttatttgtttttatttcgttgtttatatatagggtttggaagatggttatgttttatattatgtgatttttaattaatgagttgattggtttttttaataagagtttaggtagagattgttgtttagaagagtttattagattttagagaattaggtttttggtagtagggtatggtggtttatgtttttgggaggttgaggtgggtagattatttgagtttaggagttcgagattagtttgattaatatggagaaattttgtttttattaaaattataaaaaattagttgggcgtggtgatgtatgtttgtaattttagttattcgggaggttgaggtaggagaatcgttttaatttgggaggtagaggtcgcggtaagtcgagattacgttattgttttttagtttgggtaataagagcgaaatttcgttttaaaaaaaaaaaaaagagagagagaattagttttttgatagtggaaatttttttgggaagatgttatagggtttttagggttagatatagagagaaggagatattaggatagagagaagaggtaagaaaaaaatatattttgtagtttgtgaggaatagagtggtttttaggggtttttagtttaggttttggattaaagttttttaaagtttaaggcgtatttggattatttgaggattttatgaaaatatagattttgtttgatttagtaggtttgggtttgggggtgggagtttgttagtatatttttaataagtttttaggtaaggttgttgttgttgttgatttaatgattatagtttgaggttggatagagtggtttatatttgtaattttaatattttgggaggataaggtaggagggttttttgaggttagaattttgagattagtttgggtaacgtagtaggatttcgtttttaaaaaataagagagaagaagaaaaaggaaataaaaagaagattttaattagagtaggaagtagttaggttatatatttttttaatggagaaaagagttttttttttgagtaaattggagtgtatttatgttttttgttaatgacggtaattttaaatgttaagaatgtgagagaggtcggggcggcggattatatttttataattttagtattttgggaggttgaggtgggaggattatttgagtttaggaatttaagattattttgggaaataaagtgtgatgttttttttataaagttaaaaaattagttaagtatggtggtatgtgtttgtgattcgaattatataggagggtgaggtagaaggattgtttgagtttaggaggtcgaggttatagtaagttgagtttgtagtattgtatttattttagtttgggtaatagtaggattttgttttaaaaaaaaaaaaaaaaaaaaaaaaaagaatgtgagagattatggggaaggtgtggttttggggtaggggttaggagattatagaataattgttagtggttttattattgtttagaggagatagtgatttgtttatttttatgatttttttggattttttggataggattggttatatatgaaaatgtggggatttttatttttaaattgttaagaatgttaagatagtaataataaagttttaaattaagtgtatggtttttttgcgttgtaggtttacgaggtaggtagattggtatttatatttttgtatagttttttttttttgagtgtgattggggtttgtgttttattgtttggaagtaaggtttatttttaagttttattttcggggaggtggatttgagagttattattttatttttttgtttggtatttttgtgaataaatttttagttttttgtaaaatttatgttatagtgattaatttattgtgtatgggtagaacggatttggttttggttagtaatatttacgaggttttttaggagattatattgttaagagagtattgagtaatggttgggagtattttgtttaaatgattttttttttttttttaggtcgggtacggtggtttacgtttgtaattttagtattttgagaggtcgaggttggtaggttatttgaggttaggagtttaagattagtttggttaatatggtgaaattttgtttttattaaaaatataattagttgagtatggtggtatatgtttgaaattttagttattcgggtggttgaggtacgagaatcgtttgaatttaggaggtagaggttgtagtgagtagagattgtattattgtattttagtttgagtgatagagaggggtaaagttaaaaaataaataaacgaattaatttatatatttttatttttattttgtttttataaattaataaatatagtttttgtgagttggtttatgtgagttagatttaaagaaaatgattaattttgaaacgtggattaaattagttgttttgttttttagttggagttatttttttgtcgtttagtttggagtgtaatggcgtagttttggtatacggtaatttttgtttttagagtttaacgatttttttgttttagttttttgagtagttggaattataggtgtatgttattacgtttagataatttttatatttttagtagagatggggttttattaagttggttaggttggttttaaatttttgaatttaggtgattcgtcggttttagttttttaaggtgttggggttataggaatgagttattattttcgttttaaattaggttttgaatttaaaagataggttgagttttgaattagaattttgatagtttttttttgggtttttgattggagttatttagaggtgaggataaggtagttattgttttttttgagtgtttatttttttttaaaattttaatatggaaatttgaattttttatttttttttaattttttttttagttaaaaattattattattggttagttgtagtggtttatatttgtaattttagtaggtggtagaggtgggaggattagtttaggtaatatagtgagattttgtttttatagaaaaaaattttttttaattagttgggcgtttttgtgcgtatttgtagttttagttatttggggaggttgagatgggaggatggtttgagtttaggagttggagtttgtagtgagttgtgattatgttattgtattttattttgggtaagagagtgagattttatttaaataaaataaaatagttgttatttttattttatttgtagaaatgttttttattttttagaaaatattatgcgttggttgatatatttttagtgggattcgttttagaaaatgatatgtgattttgatattatttgataggttttatggtagtaaggggtaggtttgggtttacggtttagtagatgaatttaggggggtggatttgtaaggattttggagggttttagtttttttgttattttaaagatggagaaatataggtttggagaaaggaagaaataaatttagggaatgcgatagatggtattgtgttggtaggggtaggaagattaaggttgtgatattttagggagtgcgattgtagtgaagcgagtgattataaaatattgaacgtaagttttgaggttttgttatttgttggtattaaggattttgtagtgttgagttaagaggatggattttggagttagattttttgggtttataattatttagtgtttgtttttttttttaaaatgcggacggtgggaaattttgatatacgttttaatatagatgtattttgaagatattatgttaagtgaaatgagcgagttaggtacgaaagggatgggattggggtttttttgtgcgtttttttgagagataacggttttttggttatttattttgattttataggagttaggcgggtttagttttgagataggtcgttcgtcgttcgtaattggattaaagagtgttttaggcgttcgtgtcgtttaatggggtatagcggtcggggtgcgtagtcgtaggggcgtggtttgaggttcgagattcgagttttggtattggagtttgttgattttttttggttttcggttaggtcggtcggtttttattatgggtttggagttgtatttggatttgttgttttagttttgtcgcgttgtttatatttttgttaagaagaacgatatttttttcgagttgcgtatcgtggatttgattaaaggtaggtttagtttcgggtttggggaatcgaaaagttaggaaggggataggtaggtatatatagtttagggaattttttttagcgttattttttttttggggttattgttggtttggtttggagatcgaatagagaaaggtgagttagtagggagatttaagagtcggggttttttaaaattttgttcggttttacggaatagattacggggtttttttgaggtcgaataaaggggtggggattatgaagagaagttagataggaggataaaaacgggcgtagttgggtgtaggggtatacgtttgtagttttagtaattcgagaggttggggtgggaggatcgtttgagtttaggaattttaggtcgtagtgtattattatggtgtttttgaatagttattgtattttcgttagggtaatttagcgagatttcgttttaaaaaaaaaaaataaaaaaaaataaaatgaaagtaggtgtgatttcggtttagggaaaggtgggatgagagaggttaagggtgttaagtgtagagattgggatagcgttaagttttttttttatggtttagttgttgagattttgtaatagtaaatagtttaggacgtgattttttatttttgttttttgtattcgtttagtttgtattggggtttttttttgtttttttttttttttgttttttttgttttgtttttgattttgtttttgtttttttttttttgagatagagttttgtttttgttttgttgtagtgtagtggtacggatttcgaattattgtaattattatttttcgggtttaagtaatttttttgttttagttttttgagtagttagattataaatgtgtgttattatgtttggttaatttttttgtatttttaatagagatgggattttataattttggttaggttgttttcgaatttttgatattaaatgatttgtcggtttagttttttaaagtgttgggattataggtatgagttattgtgtttggtttaaggtattttgtttatttgtttgtttgtttttgagacggagtttcgttttgtcgtttaggttggagtgtagtggtaggattatagtttattgtaatttttgtcgttcgaaattttgttttttgttttttgtttttgttggggaggtaggttgttttaggttgttgatgttggaagtagtagggggattttggggtttgatgagttttatattttgttttgtttttttagtatgtttttaaggtttttgaggatttagttggtaggtttaggtttaggtttagtgtagggtggggtagtaggaggggttggaagtagaatttaggtatggttggtggggtaagtaaggcgattttatttggttaagttttttgtttagggtttttattttatggttggttttttgtttgaaatttttttatataattttttttgtaaattgtttattgttttgcgtaaggattttttttgtagagtgtggagtagaggaaagggaatgggggataagaggacgtttaagttggttgttaaatgtagtggtgtagagggaagtgtgtttttttaggagatagaggagggtttttttggtgaaggaatagtttgaagggagggtgaagagagggtagtaggttgggtatggtggtttatatttgtaattttagtattttgggaggtcgaagtaggaagattatttgaggttagtagtttaagattagtttgggtaatatagtgagattttaattgtaaggggaataaaagtttggggtatagggggtggtagtaggtatgttatatatagttttatagtgtttagggtagggtgaataaagggatatggtggggttagtagaagttgtttttaagtaggtagatattagaaaaagattatttttttgtgttttatgattttgttttagaattaatggtggaagggataaggtagttagtttttttaggtgatttatcgtgtagtttggggtgttttgattgtgagtttatgaagttggtaatagtggaaagaggagatgggtagggtgtatgtaaaggtttaggaattatattttgtatagtgagttttgttgtagaggggtagtttgtgggaggaggttgtgtttataggatttagtaaggggtgttgtttattttgtattagtcggtggagtggttttttttttttttcgtaggggtttttttagtttttgttaattaggagtgtagattggtgggaagaagaattgtgaaattggggttagagtattgtagggaggggtataggttatggcgggtttagcgttttttttttattatttattatgttggattttttttagg

SEQ ID NO: 92 - DNA, 7445 bp, Artificial Sequence
  chemically treated genomic DNA (Homo sapiens)
tttgggaagagtttagtatggtgggtggtgggaggagaacgttgagttcgttatggtttgtgtttttttttgtaatgttttggttttagttttatagtttttttttttattagtttgtatttttggttggtaaagattggaagggtttttgcgggaggaggaggagattattttatcggttggtataaaatagataatattttttgttaagttttgtaggtatagtttttttttataggttgtttttttgtaatagagtttattgtgtagggtgtggtttttggatttttgtatgtattttatttattttttttttttattattgttagttttatgaatttataattagagtattttaagttgtacgataggttatttgaggggattgattattttgttttttttattattaattttaaggtagggttatgaaatatagagaagtggtttttttttggtatttatttatttagaagtaatttttattggttttattatgtttttttgtttattttgttttgggtattgtggagttgtgtgtagtatatttgttattattttttgtgttttaaatttttattttttttatagttggggttttattatgttgtttaggttggttttgaattattggttttaagtaatttttttatttcggttttttaaagtgttgggattataggtgtgagttattatgtttagtttgttattttttttttattttttttttagattgtttttttattaggaaaatttttttttgttttttgggaaaatatatttttttttgtattattatatttgataattagtttggacgtttttttgttttttatttttttttttttattttatattttgtagaggaagtttttgcgtaggatagtgggtagtttgtagaagagattatgtggagaagttttaggtagagggttagttatggagtgggagttttgggtagaaggtttagttaagtagagtcgttttatttgttttattagttatatttggattttgtttttaattttttttattattttattttgtattgggtttgggtttgggtttgttagttgagtttttaagggttttggaggtatgttagagaaataaaatagggtgtagggtttattaagttttagggtttttttgttgtttttagtattagtagtttggggtaatttatttttttagtaggaataagaggtagaggataaggtttcgggcggtagaggttgtagtgagttgtgattttgttattgtattttagtttgggcgatagagcgagatttcgttttaaaaataaataaataaataaataaaatgttttgggttaggtatagtggtttatgtttgtaattttagtattttgggaggttaagtcggtagattatttgatgttaggagttcgagaatagtttgattaaaattgtgaaattttatttttgttaaaaatataaaaaaattagttagatatagtggtatatatttgtaatttagttatttaggaggttgaagtaggagaattgtttgaattcgggaggtggtggttgtagtgattcgagattcgtgttattgtattgtaataaagtaaaagtaagattttgttttaaaaaaaaaaggataaggataaggttagaggtaaaataggaggaatagaggaaggaagggataaagagggattttaatgtagattggacgagtgtagagggtagggatggaaagttacgttttgagttgtttgttgttgtagaattttagtagttgggttataaagaagggatttgacgttgttttagtttttatatttggtatttttgattttttttattttatttttttttaggtcgaggttatatttgtttttattttgtttttttttgttttttttttttaagacggggtttcgttagattgttttgacgggagtgtagtggttatttaagggtattatgatagtgtattgcggtttggaatttttgggtttaagcgatttttttattttagtttttcgagttgttgggattataggcgtgtgtttttgtatttagttgcgttcgtttttgtttttttgtttggtttttttttatgatttttatttttttattcggttttaggggaatttcgtggtttatttcgtgagatcgagtagagttttggggagtttcgatttttggatttttttgttggtttatttttttttgttcggtttttaaattagattagtaatggttttaggaagaaggtggcgttgggagaagttttttaagttatgtatgtttatttgttttttttttgatttttcggttttttaaattcgaggttggatttatttttaattagatttacgatgcgtagttcgaagggaatgtcgttttttttggtaaagatgtaaatagcgcggtagggttgggatagtaggtttaggtatagttttaggtttatagtggggatcgatcgatttgatcggaaattagagggagttagtaaattttagtgttaggattcgggtttcggattttagattacgtttttgcggttacgtatttcgatcgttgtgttttattgggcggtacggacgtttgggatattttttagtttaattgcgggcggcgggcggtttgttttagggttgggttcgtttggtttttgtgggattagggtgggtggttaagagatcgttgttttttagggggacgtatagagaggttttagttttatttttttcgtgtttggttcgtttattttatttagtataatgtttttaaggtgtatttgtgttgaagcgtgtgttagaattttttatcgttcgtattttagaggaggagatagatattgaatgattatagatttagaaagtttggttttaaagtttatttttttggtttaatattgtagagtttttggtgttagtaagtggtaaagttttagggtttacgtttagtgttttgtggttattcgttttattgtagtcgtattttttggaatgttatagttttggtttttttgtttttgttagtatagtgttatttatcgtattttttgggtttatttttttttttttttaggtttgtgtttttttatttttaaaatgatagggaagttagagttttttagagtttttgtaagtttatttttttggatttatttgttgagtcgtaagtttaggtttgttttttgttgttatggagtttgttaaatagtattagggttatatgttattttttaaaacgaattttattgaaagtgtgttagttaacgtataatgttttttagagaataaggaatatttttgtaaataaagtggaagtaataattgttttattttatttagatagagttttatttttttgtttagggtagaatgtagtggtatgattatagtttattatagattttaatttttgggtttaagttatttttttattttagtttttttaagtagttgggattataggtgcgtataaagacgtttagttagttaaaaaaaatttttttttgtagaggtagggttttattatgttgtttaggttgatttttttatttttgttatttgttgggattatagatgtgagttattataattggttagtaataatgatttttaattggaaaaaaaattaaggaaagatgagaaatttagatttttatgttaaagttttgaaaggaggtagatatttagagaaggtaatggttgttttatttttatttttggataattttagttagaggtttaaggaggagttgttaggattttggtttaaggtttagtttgttttttaagtttaaaatttaatttggggcgggagtggtggtttatttttataattttagtattttgggaggttgaggtcggcggattatttgagtttaggagtttgagattagtttggttaatttggtgaaattttatttttgttaaaaatataaaaattatttgggcgtggtggtatgtatttgtaattttagttatttaggaggttgaggtaggagaatcgttgaattttagaggtagaggttgtcgtgtgttaagattgcgttattgtattttaggttgggcgataagagagtaattttaattaaaaaataaaataattaatttggtttacgttttaggattgattattttttttgggtttgatttatataaattaatttataaaggttgtatttattaatttatagaaataagataaaagtgagagtgtgtgggttggttcgtttgtttgttttttgattttgtttttttttgttatttaggttgaagtgtagtggtgtaatttttgtttattgtaatttttgttttttgggtttaagcgattttcgtgttttagttattcgggtagttgggattttaggtatgtgttattatgtttagttaattgtatttttagtagagatagggttttattatgttggttaggttggttttgaatttttggttttaagtgatttgttagtttcggttttttaaagtgttgggattataggcgtgagttatcgtgttcggtttagaaagaagagaaaagttatttagatagaatgtttttaattattgtttagtgtttttttggtagtgtagttttttaggaagtttcgtgggtgttattggttaggattaggttcgttttgtttatgtatagtaaattaattattgtgatatgagttttgtaaaagattaaagatttatttataagggtgttaagtaaggaggtaggataatagtttttaaatttattttttcgaaaataaggtttagggataagttttgtttttaagtaataaagtatagattttagttatatttaaggggagggggttatataaggatgtgaatattagtttgtttgtttcgtgggtttataacgtagaagggttatgtatttggtttaaaattttgttgttgttgttttgatatttttaataatttaaaaataagggtttttatatttttatgtgtagttagttttgtttaaggagtttaaagaggttatgagggtggataggttattgttttttttgggtagtgatggggttattagtagttgttttgtagttttttagtttttattttagggttatattttttttatggttttttatatttttttttttttttttttttttttttttgagatagggttttgttgttgtttaggttggagtgagtgtagtgttgtaaatttagtttattatagtttcgattttttgggtttaaataatttttttgttttatttttttgtgtagttcggattataggtatatgttattatgtttggttaattttttgattttgtagagagggtattatattttgttttttagggtggttttgaatttttgggtttaagtgatttttttattttagttttttaaagtgttaggattataaagatgtgattcgtcgtttcggttttttttatatttttggtatttaaagttatcgttattgataaggaatatgggtatattttaatttatttaagaaaaaaatttttttttttattgaagagatatgtggtttggttgttttttattttagttgaggttttttttttgtttttttttttttttttttttttgttttttagagacgaggttttgttgcgttgtttaggttggttttaaagttttagttttaagagatttttttgttttgtttttttaaagtgttgggattataggtgtgagttattttgtttagttttaaattgtggttattagattagtagtagtagtagttttgtttgggagtttgttagaaatatattaataggtttttatttttaaatttagatttattgaattagatagagtttgtatttttataagatttttagatgatttaaatgcgttttaaattttgaggagttttgatttagaatttgggttggaggtttttgggggttattttgttttttatagattgtaaggtatgttttttttttgttttttttttttgttttaatgtttttttttttttgtgtttgattttgaggattttatgatatttttttaggggagtttttattgttaaagagttgatttttttttttttttttttttttttgagacggagtttcgtttttgttgtttaggttggagggtaatggcgtgatttcggtttatcgcgatttttgttttttaggttgaagcgatttttttgttttagtttttcgagtagttgggattataggtatgtattattacgtttagttaattttttgtagttttagtagagatagggtttttttatgttggttaggttggtttcgaatttttgaatttaggtgatttgtttattttagttttttaaaggtatgagttattatgttttattgttagaggtttgattttttagaatttgatgggtttttttagatagtaatttttatttgggtttttgttgaagaagttaattagtttattggttggaggttatatgatataaaatatggttattttttaagttttatgtgtggataacgagatagggataagtaggtatattacgttttgatatttggatttatatttgtcgttgggtttacgtttgtttttaggtttttaggatatatttttatggggagtttttttttttttttttaatgtggttatttataattttatatttaatagttaaataggagtggaagttatagagttttacgtaaataataggttaggttgtgggattgagtaaaaggtattggattgtggtaggttttattttaagatggttaaatggaagggtttttagttttttttgtttttgttttatattttgagataaaatgtttaatttttatattttagaataaaaagagttatattttatgttttatattttttgtatgtttttttttatatttttttgaataatgtaattatatttttattatgaggtataatttatatattataatattcgtttttttaaaatatattttaaaatttaattggtttaaagttaatttattggtttttagtatattaataaagttttgttattattataattatttaattttagattatttttattatttttaaaagaaattttgtatttattaaatagttattttttatttttttttttttttagtttttggtaattatttatttattttttatttttgtggatagtaagtatttgtttattttggatattttatttaaatttaataatgaaatatgtgagtttttatgattggttttttttatttaatataatggtgttaaggtttatttatggtgtagtatataatagtattttatttttttttgtggttgaattatattttattttatgtatatattatattttgtttatttatttattagttgatggatttttgtattgattttattttttagttattgtgaatttttatgttgtgatgaatatttacgtataagtttttgtttggatatatgtttttag

SEQ ID NO: 93 - DNA, 5816 bp, Artificial Sequence
  chemically treated genomic DNA (Homo sapiens)
attttagtattttgcgaggtttaggcgggcggattatttgaggttaggagtttgagattagtttggttaatatgacgaaatttcgtttttattaaagatataaaaattagtcgggcgtggtggtagacgttgtaattttagttgttcgggaggttgaggtaggagaatcgtttgaatcggggaggtggaggttgtagtgagtcgagatcgcgttattgtattttagtttgggtgatagagcgagattttatttcgaaaaaatattagaaaatatggaattttgttggcgtggtttaaatatgagtgtggttagtgtggtaaaattatttgaattgtatattataaatatgattgaagttgtggtcgagtaatgtggtttatatttgtaattttagtattttgggaggttaagaagggaggattgtttgagtttaggagttaaagattaggttaggtaatatagtaagatttttttttttattttttataaaaaaaaaaaaaaaaaagaaagaaatttgggtgttgtggtgtgtgtttgtagttttagttatttgggcggttgaggtaggaggattgtttgagcgtaggagatttaggttgtagggagttatgattgtgttattgtattttattttagatgatagagtgagatttaggttttttttttttttataaaaaagaaagaaaaaatttgtaagtttatatgtataattttaattacgtgtataaaattttttataagtgtgtatatttaaaggagtttttattgaaaggtcgatagagtttttgtttgttatgattttgttttattagtagtttgtttattagatgatttagatattagaaggtttgagatatacgataggtaaatatgatagttttaaggggagagggtagggataggtggtaagtttgggattaggtgtggggtatggataagttagtggttcgggagtggggtgtagagaagattgtggttaaggttatgaggaggtatgggagagggttaggaaataattagggatttttttttttgtaaggaggtttatgaattagttttgtattttatttgtggaatataatatcgttttatagtgaggagagagatcgaggagattaaggttgattttgatttagatatttttttattaggttattttttatcgatgatatatgtttagttcgggggtatttttcgtaaggaaatattggggttgaggagtttagagaggtcgtttgatttggattggggttggggaggttagggaagtttttttggagaagagatagggtgttaaatgttaaaagattaggaagggtattaggcgaagatgaggagggaatagtatgagcggaggttaagaggttaaggtgggagtttagagaggggttaggagtgtgtaggtagaaggggttatttggaggagtgggagtaaggttttgaatgtaaagtttaatgatttgtattttagtttttgggtagtgaggaattatataaagttttatatagaaggttagggttaagtaagcgtttgtttaagttttttttagaggttatatggaagttagaatggaatggggtaggagataaaaggaatgtaggtatgatatttggaggaattgtggattagagtttttgtagatatgttttttttttaattaaggagacggatagttttatgtttttattttattaatatagtatttttttagtggtttagtaagtgtgggatacgtatttatagtaagaaaagttgtattaaggtttttagattttttttaatagtaggttttattggaggtaggtttttggtttttaggatagttgggagggttttttggaagaggttttttcgtattgtagtttttacgtgttgggtattatgttgttatcgtgggttcgtttttaaagatttagtagttagtattgatgggttaggggaagatagagttagcggaggggttgggtatagttaagtgtaaggtagtatgatttgttttaggggttttttgattggatttttttttttttattatgtgtgtgatgggttaggatgtttttttttttggggatatttggaagttttttaatatagttgcggtgaggggtttgtaaagttttattttatagatgaggatattgaggtttagaaggagaagtgatttatatagggttttatagttagaaaagataatatgagttgggatgttagtttttttttcggatatattattgtttagcgggttatcgtattttatggtatttttatgttttagtttcgtgattgttattaagttagttatagagatacggggtttagtaaggaaggtttggtttcgtaggaatttgttttcgagtagttgtaggtattcgtttagtttagttaaagtggtcgttaatatttcgggtggtattgattcgtttaggaatatagggattattatttggtgggtcgataggtagagagaggggttagggtttgtttaaagtttattttggtttttattattattttattattattagtttttgggatttttgtttatttttgtttatttttttttatttatagttattagtagtttttattttttatttaaatagggatagttttttttttttttttgggtttttatataaggtaattagtgggatttttttgtaattttaatttgttcgtatttttttttgtataaagttttttatggttttttattgtttttatgagaaaggttttaatataaagttagttttttttagtgcggtagttattttttttttattttttattttattttttattattttttatttattaaacgggaatgtgtgtatgaattttttttggaatttggttatagtttatgtttttaattagtaaggttagagtggggtttgagtttttgtatttttaataagttttttggtgatgttgatatttttagtttattgattatattttggataggaagagtttatatttgttttatttaatttttttttattttgtttttaaatatattacgtttttttttttattagttggagggggttttgtttttaggttttagaggttaaggtagatatagttaaggtgtggaaatttttttattgttcgatggattttttagagaggcggttttttatttttagtagggcgcgtgtttatttgttttatgttgttttatatatagggtgttatttttgtgttgggtattgggtaagtgttttgtatatattaattaggagtatttattttaaaaatatgtgtgtttttgataaataaaaatagtatgtgtatgttgtgttggtgtgtgtttttttgattattattgaagttaaatatgtttttatttatgtattgattatttttttttgttttttaatgaaatttttgttgatttttttcgtttattttttttttgtgttttcgtttgatgagttttttttttttttgtttgttcgtttgtttgttttgagatagtttcgtttagtggttcggttggagtgtagtggtatgattttagtttattgaaatttttgtttttaaggtttaagtgatttttttgttttagtttttcgagtgtgttatcgtatttagttaatttttgtatttttagtagagacggggttttatcgtgttgtttaggttggttttaaatttttgattttaattgattcgtttatttttgttttttaaagtatagggattataggcgtgaattattatattttatttgtttgatgggtttttaagaatattttaaaggatattatttttttttgacgtattttttatcgagattttttttagttttttgtttaaggttaatttatttttttttttataaagtaattttgtatatgtattggttttttttttgttgagtttttttattgttttgaggtttagaaagtttttttatatttagatattagagaaatagatttcgtgagagtaattgggattgtaggtgtgggttagtatgttttgttattattttttttttttgagttagttttttttttttagtttcgtttatttttcgaatttaggaaatgttattataggtggttttagttttcgtttatttttttatagggagtttttttttttagttttagttttaaaatttttaaggaagtattttggtttattcgtttgggttattggttagagggatgggatattttgaaagatttagttagagtttcgggtttagttttggattattattgtgttttttggtgagatgttagggttgggatttagggagaagaaaggaggttttcggatagttatttttgtttttcgcggttgcgggttttttgtttttattttgtgtacgaagtgggagttttcgttgtttggtagttttcgttgtttggtagtagttgttttgtaggggatagtttggacggtagaaagtttatttttaattttagttttttagttaaggtttttattagtttgggatatttgtaagtgttatattttattgggtgaaattttaagattttttttaggggattttattcgttttttttttttcgttattatgtagcgtcgagaaatagagttttgaacgaatttttagatgttcgtgcgttggggtttttttaggacggcggcgtttagtcgtttttgggttagggcgacgtttggaattgggtagggtttttggtatcgggatttcgaaaagtagatttgtttttttttgtttagtcggttttttttttttttgtagtcggttttttgtattcgcgttttttttgttagtcgagggtttttagttttaattttatttttttagttgtgcgtttatagcgatcgttttttttgtagggacgtacggatttggtggtggagttttggtcggtaggattggataggaatcgaaggggcgaggcgggttcgggggtggtgcgttttaattgggtgttgtttttagggggtggggtttgattttttatttttcggcgcgtcgggattttgttatagttgttgtttatatcgcgtttagcgtttttattgttattttcgttgtttttgtcgttttcgttatgggtttagagttgttttttgatttggtgttttagtttagtcgcgtcgtttatattttcgttaagaagaatggtatttttttagagttgcgtatcgtggatttggttaaaggtgggtttagttcgttttttcgcgtgtttataaatttagtgtatttttaggttttcgttttgttttgttttgagcgtttcgtcgttcgtatagtttttttatttttttttgtagcgtttgttattagagaatgttgtggattgagtggttttgaagggattatagtttttttgaattttagtttgttttttgaaaaggaggataacgttattttttgttttgtagggatggaaagaaaatattgaatggagttgatagagtttttgcgtggaatgtacgtatataaatttataaagtttagaagatttcgggaagaaggatatattgttgtgagaattaagagatgggaagagatgagttattttagtttgtttttttttttttggtttattagagttcggttagaaaatttttttttatttatttgttgtatttggttttatttattaaaattttttagttgtttcggaatgtggtagggtagggaggtttagttagggagtgaggttgatttaggtttttagttttagattttgttgttttttagggttgtggggtttcgtttggggaggaggagggagggtgtagaggtgtagcgtttttattttgaagattttttttgatttttttttttttagg

SEQ ID NO: 94 - DNA, 5816 bp, Artificial Sequence
  chemically treated genomic DNA (Homo sapiens)
tttgaagaggaagaagttagaaaaggtttttagagtaaaaacgttgtatttttatattttttttttttttttttaagcggagttttatagttttgagaaatagtaaggtttgggattagaggtttggattagttttattttttggttgggtttttttgttttgttatatttcggggtagttggggggttttggtgggtggggttaggtgtagtaggtggataaagagaagttttttagtcggattttggtgggttaggggaggggaggtaaattggggtggtttatttttttttattttttaatttttataatagtatgttttttttttcgaggttttttgggttttgtgaatttatatgcgtgtattttacgtaagaattttgttaattttatttagtattttttttttatttttatagagtagaaggtaacgttatttttttttttagaaggtaagttaaggtttagagaggttgtgatttttttaaggttatttagtttatagtattttttggtggtagacgttgtaggaggaggtgagggggttgtgcgggcggcgagacgtttagggtagagtagggcgggggtttgggggtgtattgggtttgtggatacgcggggaaacgggttgggtttatttttgattaaatttacggtgcgtagttttaaggggatgttattttttttggcgaagatgtagacggcgcggttgggttgggatattaggttaagaaatagttttaggtttatggcgggggcggtaaggatagcggggatggtagtgaaggcgttgagcgcggtgtgggtagtagttgtggtaggatttcggcgcgtcgggaaataggggattaggttttattttttggggatagtatttaattggagcgtattattttcggattcgtttcgttttttcggtttttgtttagttttgtcggttaagattttattattagattcgtgcgtttttatagggagggcggtcgttatgaacgtatagttgggagggtggagttggagttggggattttcgattggtagggaggacgcggatgtagggggtcgattgtaaggggaaggggaatcggttggatagggagaagtaggtttgtttttcgggatttcggtgttagggattttgtttagttttaggcgtcgttttgatttagaaacgattgggcgtcgtcgttttggaaaggttttagcgtacggatatttgagggttcgtttagagttttgtttttcggcgttgtatggtggcggaagggagggagcgaatgggattttttaaaagggattttagagttttatttagtgggatgtgatatttgtaggtgttttaaattggtgggaattttgattggaaggttggggttaaggatgaattttttgtcgtttagattgttttttgtagagtagttgttgttagatagcgggagttgttagatagcgggagtttttatttcgtgtataggatgggggtagggagttcgtagtcgcgggaggtaggaatgattgttcgggaatttttttttttttttttgaattttagttttggtattttattagggggtatagtgatggtttagggttgggttcgggattttagttgaattttttagagtattttatttttttggttagtggtttaagcgagtgaattagaatgtttttttgggagttttgaaattggaattggagagaggagttttttatggggaggtaaacgggagttggggttatttgtagtgatattttttgagttcgaggagtagacgagattgagagagaaaagttgatttagagaaagggagtgataatagggtatgttggtttatatttgtaattttagttatttttacgggatttgtttttttgatgtttgggtatgaaaggattttttaagttttagaatagtgggagaatttaataaagaaaaaattaatatatatataaggttattttgtggaggaaaaaatggattaattttaagtaaaaaattgggaaggatttcggtaaaagatacgttagaaggaagtaatgttttttaagatgtttttagaaatttattagataggtggggtgtggtggtttacgtttgtaatttttgtattttgggaggtagagatgggcggattagttgaggttaggagtttgagattagtttgggtaatacggtgaagtttcgtttttattaaaaatataaaaattagttgggtgcggtggtatattcgggaggttgagataggagaattatttgaattttggaggtagaggttttagtgagttgagattatattattgtattttagtcgggttattgagcgagattgttttaaaataaataaacgaataaataaaaagaagagaaatttattagacgaagatataggaaaaaaatgagcgaaggaaattagtagaggttttattgaaggataaagagaaatggttaatatatggatgaaaatatgtttaattttagtaataattaaggaagtatatattaatataatatgtatatattgtttttatttattaaaggtatatatatttttgaaatgagtatttttaattaatatgtatagagtatttatttagtgtttagtataggggtggtattttgtgtgtgagatagtatgaaataggtagatacgcgttttgttgaaagtaagggatcgtttttttggaggatttatcgggtaataaggaggtttttatattttaattgtgtttgttttgatttttggggtttgggagtagagttttttttagttggtggggaaggaagcgtggtgtgtttgaggatagaatggagagaagttgagtagagtaagtgtagattttttttatttaaagtgtggttaatggattgggagtattagtattattagggagtttgttggaaatgtagaggtttaggttttattttgattttattgattgggagtataaattgtaattagattttagggaggatttatatatatattttcgtttgataagtggggggtagtaggaggtgaggtgaaaagtggggaggggatggttatcgtattggagaaggttggttttgtgttgaggttttttttatgagggtagtggggagttatggaaggttttatgtaagagagggtacgggtagattgagattatagaaggattttattggttgttttgtgtgaggatttagggagaagggggaggttgtttttgtttgagtaggagatgagagttattggtggttatgagtggaaagaagtgagtagaggtgagtagaaattttaaggattggtgatgataggatgatggtgggaattaggatgggttttgggtagattttgatttttttttttgtttgtcggtttattagataataatttttgtgtttttgggcgagttagtgttattcgagatgttggcggttattttggttgagttggacggatgtttgtagttgttcgaggataagtttttgcgggattaggttttttttattgggtttcgtatttttgtggttggtttggtggtaattacggagttgaggtatgagagtgttatggggtgcggtggttcgttgggtagtggtgtattcgggaagggagttgatattttagtttatgttgttttttttggttgtgggattttgtgtgagttatttttttttttgagttttagtgtttttatttataaaatggggttttataaattttttatcgtagttatattaagaggtttttaagtgtttttagggagggggatattttagtttattatatatatggtggaggagggaaaatttaattagagaatttttaaagtaggttatgttgttttatatttggttatgtttagttttttcgttgattttgtttttttttagtttattagtgttggttgttgagtttttgaaagcggatttacggtggtagtatggtgtttaatacgtggaggttgtagtgcgggaggattttttttaggaggtttttttagttgttttgaaggttaaggatttgtttttagtagaatttgttgttaaagagaatttgaagattttaatgtagttttttttgttgtgagtgcgtgttttatatttgttgagttattgaggggatgttgtgttggtagaataaagatatggagttgttcgtttttttggttgaagagaagatatatttgtaaaggttttggtttatagtttttttagatattatgtttgtattttttttgttttttattttattttattttagtttttatgtgatttttgaaaagagtttgggtaaacgtttatttgattttgattttttgtgtggaattttgtatggttttttattgtttagaagttaaagtataagttattgaattttgtatttaaggttttgtttttatttttttaggtggttttttttgtttgtatatttttaatttttttttgggtttttattttggttttttggttttcgtttatgttgttttttttttattttcgtttggtgttttttttggttttttggtatttggtattttgttttttttttagggagatttttttgatttttttagttttagtttaggttaggcgatttttttgggttttttagttttagtgtttttttgcgggggatattttcggattgagtatgtattatcgatgaggggtgatttggtggaaagatgtttgaattaggattagttttggttttttcggtttttttttttattgtggggcgatgttgtgttttataagtggggtgtagggttggtttatgaatttttttgtaggaagggaagtttttggttattttttggtttttttttatgtttttttataattttgattatagttttttttatattttattttcggattattggtttgtttatgttttatatttggttttagatttgttatttgtttttgttttttttttttaggattgttatatttatttgtcgtgtgttttagattttttgatatttgagttatttaataaataaattgttaataggataagattatgatagatagagattttgtcggttttttagtggaggtttttttaagtatgtatatttatagagaattttatatacgtagttgaaattgtatatataaatttgtaaatttttttttttttttttgtgggggaggggggagtttgggttttattttgttatttagggtggagtgtagtggtatagttatagttttttgtagtttagattttttgcgtttaagtaatttttttgttttagtcgtttaggtagttaggattataggtatatattatagtatttagattttttttttttttttttttttttttgtagaaaataaagaagagaattttgttatgttgtttagtttgatttttaatttttgggtttaagtaattttttttttttagttttttaaagtgttgagattataggtgtgagttatattgttcgattataattttagttatatttgtaatgtataatttaagtgattttgttatattgattatatttatgtttaagttacgttaatagagttttatgttttttgatgttttttcgagatggagtttcgttttgttatttaggttggagtgtaatggcgcgatttcggtttattgtaatttttattttttcggtttaagcgatttttttgttttagtttttcgagtagttgggattataacgtttgttattacgttcggttaatttttgtatttttagtagagacggggtttcgttatgttggttaggttggttttaaatttttgattttaggtgattcgttcgtttggatttcgtaaagtgttgggat

SEQ ID NO: 95 - DNA, 5244 bp, Artificial Sequence
  chemically treated genomic DNA (Homo sapiens)
agttttttaaatgatagtagtcgttattttatttttttttatttgatttttttttattttaatgttattttttagaagttattttttaattgaagaaatagaagggaattaatattttggaagtatttttttatattatgtatttatttttttttatttttttttttttttttggatgtagttattattttgaattttgtgattattgttttttgttttttaattttattatgtatgtatgagttataattaatgtgttgttttattttgtttgtttttaaagttaatatatgtagaattatattatatatattattgtgatttgttattttggtttaatattatgtttttgagagggatttaagttgataattatagttgtagattatttgtttttattgttgggtagatgtttattatatgaatataatataatttatttattttttttttaatggatttttaatatttttttaattttttttttatttaagtttttttttttttttttttttttttgagataaagttttatttattttgttgtttaggttggagtgtaatggtatgaatttttgatttttaattagtagaatttttttagattagttttttaggttattaagaaatgtagttgtaaaaacgtatgtattgtttttttttaattgtggttatgggtagtatgttaatataaaaggaagagggtgaattaaaattaatgtaattaggtaatttgagttaaggttgagggttgtaatttaggagtataggtttaagttgttttgaatagatatttttattagtagtagttataagtggatttttaaaggtaaaaaggggttttaggaagtgggttgatatagagttgtttgttaggaatttttattggtttatagaaataatattgattagtagttggttatatattgttaagttatagattgtgggttatatttgttgtagtattattaggttaatttatagttatttgtggttataataagtagttttaagaggtgaatatatagttcgaagcggggagtggggtatgattgttgttttattttaatgtttttttgggtttaataatttgaaatggtttatattttttagatgaaagttttattttttttttaggtgtatatttagatgtttatataattataaaggatttggagaggatttattgtaatgtatattagtaatatagtacggtagtttattgggagagtatatttttaatttttttttttgaggaattaattttttattttatttattgatgaggtggattttttaaattattgtaataaaatattatattatttatattaaattaggggatagggtattttaagtaaaatttttaaagtaatattttgatgtgaaatttttttttggttatttagaagttttattttgttaagttttaatttataaggttatttgtatgaagttattaatgtgttaaaaagttaatatttttaaaaagagttaagtagtgtttatattttagtaaaaatgtggtcgatttttaaaaatttatatttattttttgtttatttattaaattaaattaaaatatgtagtgattatatttatttaatatattttatgttaagtattgttttgagtgttttttgtatagtaattaatttaattttgttatagattttatgttagagacgtttgaattagagcgattttattttgagtgagggttaggaagatgcggttgggatttgttgggtcgtatttttagaaagttaggtatttttagtttttagatgtttatggttaagggaatagattgataatgtttattaaatagatttagatttaggagtgtttagatatttcgatattttgagaataaaggtatttttaattttgttttaaagataataatattgatttttgtaaaatatagtaattatgaaaattaattttttattataaaaagagtatatttttttatattttttttttattttatatatataggtattgaatttggggtggacgttttcgtttttttattttcgggaatattttattttgtttatggagtagttgtttttttattattttatttttttaataaatttgtttttgttttgtacggtggattcgttttgaatttttttttatgcgagatttaagaatttttttttgggtttggattaggatttttttttcgtaatatttatgtaggaggaataatatgtgttttattttattttataggtgaggaaattgaaatatattgaggttagtgatttttttatgtttatagttaataagtggttgttacgggttgaattgtgtttttttaattttatatattgatgttttaatttttagtgttttagtatgtgattttatttggaaatagggttgttgtagatgtaattaaattaaaatgaggttatattggagtgtgaatgaagatgaaggtatagatggggtgggtggtgtttttgtattttaagggatattaaagatttttttaaattattagaagttgggagagaggtatggaatagatttttttatagattttttttttagaaggtagtaattttgttgatatttttattttggatttgtagtttttagaattgtgaggtaatatatttttgttatttaagttattttgtagtattttgttattttagttttagtaattgaatataggggtggagttaggattaaaataggtagggtgttttaatatttggtgttttttattttattttttgttttttttataatagggttaattaaaataaaaatagatatttattttaattttattttaataaatggtataggagttattagtttttaaatttaggtaaataaggaaattattgaatagtttttttttttatttgtatgatggttttggaattttttttttttgatttttaagttaaaagagttgtttgagaggattttttggttagatttttatttttagatttaaaattaaatttatttatgttatttgtttgattttgagtttgtgtttttattgtaattgaaatgtaggtttagttgtttttcgtttttagagtttaattattaataagaagagtaaagtttggtataaagaaagtgattttttattttaaagttagtttagggggagtaaaataggttttttgttttaagggtattattttgtttttggggtagaaagtaggggtttttaaagggggtagttggtatgaattgtatgttggggagggagcgagtgggtgggggttcgtatgatttattttggtgttttatttgttgggttgtgttattatgggtagaagttatttgtaaagtggttttgttttaggtatatttttggatgtaaatggattgttatttttggaggtagttttttggggggtgagagttttgttttggagtttttaagtaaatatttagttagataagtttgttttgtagggagtgttaggtgaagggaaggtaaaagatgataattgtatttttaaagagttaagtaggaagtggggaatagggagaaaggaggaaatagagaagatgggagaaataaataatgtaaaaaataatttattttttattttttagaaaaatgggagtattgttatattattagggttttaaaatataaatgtttaataagtgggagagttttgaaagtagtattattattttgaggttgataatatttaggtttgtgttgttttttatgggttaaaatgaaaaggatgtattttataggtgacggtagggatagaggtttttttagtagttacgttaagttagtattgatagaaaaaggaaaagtttgtttaggtggttgggtaattttgtagcgaggtatagatgagtttgtaaattaaaggaaatgattaaggtgagttttaatttttttagaggtttattttgttaaggttgaggatatatttgagaaaaaggaatataaaattataggaatatttgtgatttgtgttttttttaaagagggtttgaggattttaatatttaaagggaaagagtaggtagtaggggaaagtggaaagtaaaaagggaaggtagataaaaggggagagtagttgtattttttggggtttttgattagtatttattgaatgcgtatgttatattcgtgaaaggaggtcgtagaggaatagttagttatgtattcgtttagtgtttggtgaatttgtatttttataagattaaatatagggtagaggaagcggttaaattgtatttttttttagcgagaggaaggatgatttttagatttgtttttgttttatatttgggaagataagttgttagtttatattgttaagatgaaatttaattgatttgttttagagtaaagattttgcgggttaataaggaatttttttggggaggtgtgtggtttttgatttttgtagttatttagtaataaaatgggaggtagtgttgtttgatttagtttttaagtttgatttttttttttggtatagtgagtttggagttaagagatttttattttttttttataagttgaataggagtttttggagagaacgttttggatcggtgagtgagttatgaggtcgggttataggttttgaagtcgtgaagttttgggacggagcgggtggtgtttcgaggttagtgttacgggagggaggttagggttagggttagacgtggagtttcgtggagtgcggagtggtgattttttcgttcgggggcggagggatgattgagtatttataatttttgtgtattttttcgtgggtgtagtttttggttagcgagatgttttgatatagttttttaagatgttttaagggttattttataaagtcgggaaggtataacgggtggagttggcggtcgtcgggggtaggtatttttgagttaaggaggaagcgggggagggaaggagggcgggaaggacgcgttatttattttttgaattttttgtaaattttagaggagttcggtttgcgttgcgttacgatgttcggggagttagttaggagtttggggaagggtgaggtttgttcgtcgcgaagagggggtgatttcggcgattttcggcggtatgttcgaggttgtttcgggagtttagtcgttcgggagcgttttatcggcggggaacgggtcggagttgtagtgggacgcgggggcggtgggatacggggggtttcgatatttttttgggtcgtaatcgttttcgttttttttcggtagg

SEQ ID NO: 96 - DNA, 5244 bp, Artificial Sequence
  chemically treated genomic DNA (Homo sapiens)
tttgtcggggagaagcgaaggcgattacggtttagagaggtgtcgagatttttcgtattttatcgttttcgcgttttattgtagtttcgattcgtttttcgtcggtggggcgttttcgggcggttgggttttcggagtagtttcgaatatgtcgtcgggggtcgtcgagattatttttttttcgcggcgggtaggttttatttttttttaagtttttggttgatttttcggatatcgtggcgtagcgtaggtcgagtttttttggggtttgtaggggatttaggaagtaggtggcgcgtttttttcgttttttttttttttttcgttttttttttagtttaaaagtgtttgttttcggcggtcgttagttttattcgttgtgttttttcggttttatgggatagtttttaaaatattttaaggggttgtgttaaagtatttcgttggttaagggttgtatttacggggagatatataaaagttataaatgtttagttattttttcgttttcgaacgaaggggttattatttcgtattttacggggttttacgtttgattttgattttgatttttttttcgtgatattgatttcgaagtattattcgtttcgttttaaggttttacgattttagagtttgtggttcgattttatggtttatttatcggtttagagcgttttttttaaaggtttttgtttagtttgtgaagggaaaataaaaattttttgattttaaatttattatgttaaagggaagagttaagtttggaaattgagttaggtaatattgttttttattttgttgttaaatagttataaagattaaaggttatatatttttttaaggaaattttttgttggttcgtaagatttttattttaaaatagattagttgaattttattttggtaatgtaaattaatagtttatttttttaagtatgggataaagataggtttaggagttattttttttttcgttggagaaaaatgtaatttgatcgttttttttattttatatttaattttgtaaaaatgtagatttattaagtattagacgaatgtataattgattatttttttacgatttttttttacgaatgtaatatgcgtatttagtgaatgttgattaaaggttttaaagaatgtaattattttttttttttatttattttttttttttattttttatttttttttattgtttgttttttttttttaaatattgaagtttttaagttttttttggaaagagtatagattatagatgtttttgtgattttgtgttttttttttttagatgtgtttttaattttggtaaaataaatttttaaaaggattgagatttattttggttattttttttgatttataagtttatttatgtttcgttgtagggttgtttagttatttggataggttttttttttttttgttagtattagtttaacgtgattattgggagggtttttgtttttatcgttatttgtaggatatattttttttattttaatttataggagatagtataaatttggatattattaattttagaataatggtgttgtttttaaaatttttttatttattaaatatttgtgttttggagttttggtaatataatagtatttttatttttttaagagatagaggatgagttattttttatattatttattttttttattttttttgtttttttttttttttttgttttttattttttatttagttttttagaaatgtaattattattttttattttttttttatttgatattttttatagggtaagtttatttaattgggtgtttatttaaaagttttagagtaggatttttattttttaggagattgtttttagagataatagtttatttatatttaaaagtatgtttgagataaggttattttataaatgatttttgtttatgatggtataatttagtagataaagtattaaagtgagttatgcgaatttttatttattcgttttttttttagtatgtagtttatattaattgttttttttaaaagtttttgttttttgttttagaagtaaagtggtatttttaaggtaggaagtttgttttgttttttttaagttagttttggaataaaaaattattttttttatattagattttgttttttttattaataattggattttgaaagcgggaagtaattgaatttgtattttagttataataagggtataggtttagaattaagtaggtggtatgagtgaatttagttttgggtttgggaataaaggtttggttagagagtttttttaaatagtttttttaatttaggggttaggaaagaggggttttagggttattatatagatgaggaaaaagattatttaatgatttttttgtttgtttagatttgaaagttggtaatttttgtgttatttattggggtgagattggggtagatgtttatttttattttgattagttttattatgggaggagtagagaatgaggtgaaaagtattaagtgttggagtattttgtttgttttgattttggttttatttttgtatttagttgttaggattagggtaataaagtattgtagagtggtttaaataatagaagtgtgttgttttatagttttagaggttataagtttaagatgaaggtgttagtagggttgttgttttttgaggagggagtttgtgagggagtttgttttatgttttttttttagtttttagtggtttgagggaatttttggtgttttttggagtgtagaagtattatttattttatttgtgtttttatttttatttatattttagtatgattttattttaatttagttatatttgtaataattttatttttaaataaggttatatattggggtattggggattagaatattaatgtatgaaattgggggagtataatttaattcgtaataattatttattaattgtgaatatggggaagttattaattttagtgtgttttagtttttttatttgtaaaataagatggaatatatgttattttttttgtatagatgttacgggaaaggggttttgatttagatttaagagagggtttttggatttcgtataagaaagaatttagagcgagtttatcgtgtaaaataaaagtaagtttattaagaaagtaaagtggtgaaaaaatagttattttatagatagagtagggtgttttcgaaagtaagaggacgaaggcgtttattttaggtttaatgtttgtatatataggatgaaaaaaagatatggggagatgtgttttttttgtgataaagggttaatttttataattattatgttttgtaagaattaatattattatttttaaagtaaaattaggaatgtttttgtttttaagatatcgggatatttggatatttttaagtttgggtttgtttagtaaatattattaatttatttttttaattataaatatttagaggttaggaatatttaattttttgggaatgcggtttagtaagttttagtcgtatttttttagtttttatttaagatggagtcgttttggtttaaacgtttttgatatagagtttgtggtaggattaaattagttattatatagaaagtatttagagtagtgtttggtatagaatatgttaaataaatgtgattattatatattttgatttaatttagtaaataggtaagaaatagatataaatttttaaaaatcgattatatttttgttaaaatatgggtattgtttaattttttttaaggatattgattttttagtatattaatgattttatgtaaataattttgtaaattgaaatttggtaaggtaaaatttttgaatggttaaaaaaaaattttatattaaggtattattttaaaagttttatttggaatgttttgttttttaatttagtatgaataatgtaatattttattgtaatgatttgaaagatttattttattaataaataaagtaaaaggttaattttttaaagaaagaaattgaaaatatatttttttagtgaattatcgtattatattattggtgtgtattataataggttttttttaagttttttgtggttgtgtaaatatttgaatatatatttgaggaaagaatagaatttttatttgaggaatgtgagttattttaaattattaggtttaaagagatattaaaatgagatagtaattatgttttatttttcgtttcgagttatgtatttattttttgaaattgtttgttatagttataagtagttataaattaatttaataatgttatagtaaatataatttatagtttatagtttaataatgtgtagttagttattaattaatgttatttttgtaaattaatgagaatttttgatagataattttatgttagtttattttttgaagtttttttttgtttttagaaatttatttgtaattgttgttaatgagagtatttatttagagtaatttgaatttatatttttgggttgtaatttttaattttggtttaaattatttaattgtattaattttggtttatttttttttttttatgttgatatgttgtttatagttatagttaaaaggaaataatatatgcgtttttataattatattttttaataatttaagagattaatttgagaggattttgttggttaaagattaagagtttatgttattgtattttagtttgggtaatagagtgagtgagattttgttttaaaaaaaaaaaaaaaaaagaagaagtttgaatagaaaaaaaattgaggggatattaaaagtttattgaaagaagaatggataaattgtgttgtatttatataatggatatttatttaataatgaaaataaatagtttatagttatagttattaatttaaattttttttaaaaatatgatattgagttagaatagtaagttataataatatatatggtatgattttatatgtgttaattttaaaaataggtaaagtgaaatagtatattagttatggtttatgtatatatggtagaattgaaaagtagggaataataattatagaatttaggatggtagttatatttaggggaaaggaagggaatggaaaagggtgggtgtatgatgtagggaggtgtttttagggtattggtttttttttgtttttttagttggaaggtggtttttagagaatggtattgagatgggaaaggattaggtggggagaaatgaggtggcgattgttgttatttgaaaagtt

SEQ ID NO: 97 - DNA, 8805 bp, Artificial Sequence
  chemically treated genomic DNA (Homo sapiens)
tgtattagaattatagtgttatttgttggatataggtattaagtatattttttttaaaaggatagttattaattttttagttaattatttaatattttgaaattgattgttagatttataaaggttttaggattttttggtttagtatttttattttggggtgggttaatgggaatttattgataataagggaagggtttaataagttttattgattttatggaaatagtatatttaagagtatagttggtaattttagttatttaggaggttgaggtaggaggatggtttgaggttaggagtttaagattagttttggtaggatagtgagaatttagtttttaaaaaatttgttttaattagttggatatggtggtacgtgtttgtagtgttagttatttaggaggttgagataggaggagtttaggagtttgaggatgtagtgagttatgattgtattattttattttagattgggtaatagagttagattttatttttaaaaaaaaaaaaaaaaaaaaaaaagagtatagttagtttggttttagaggtattttggttttacgtgaagaagtggtagtttttattttgggagaaataattttttttgttatttgaagtcgagttgttgtttagtagggtttttgatttataggggtttttgtaaatgtttaggtttggtttattaatgattaggttgagttaaaagttgatgttgtttattaagtagtagtaggtatttagttttaatgataattttggatggttgatggtagtaaggattgaagtatttggtatgttatttggaagattaaatattgagagatgaaagttgagaagtgtggaaatatattatggttgtttgttaataggatagattggattatttacgtaggtgtttatattaagggtaggtattttcgtaagattgattggaattaaattgttgatttagtttgtattattaagattgttgttatagttatttggatttatgtaatcggtgtggaaatatttattattatgggttaggtataacgtaagggattatatgtttttgaggtagaagttattattgcgtgttagatttgtgatttttgttaaaagttggtttgtttgttttgtagtaaaggaagttatattgtaaggggtattgattatatttgtttttgggagattgatattaggattttgtttttttttttaggtttttattagtattttgttattgttgatatttttttagtttatagtgttgatgttgtttttttagtttaattatttgattttgtgtatattattgtggtttttgaaattaaattgttaggttttttgttttttaaattatttatagtttgatattggtatatttttttgtcgtaatggttatttaatagtgttaatagttaatagttaaggtattcgatggattttttatattttttattatttataggtatgatattgttaagtattgaatagtttttttaaagattaatttaaaaagatttttgattttatgtttttaatttttttttggtttgtaaattttattgaagtagtttggttatttaaggtagttatttttagaaatgggttatttttttttgtttattaattgggtaatgattaggaaaaaggggtggagggttatataaatttattttgaaaatgtgagatttttttttgattatttttggttatgatttatttttttttttttttatagaaagtttagattagttgggaggaggaggttatttatgtaatttagatttaattttagtttagttattagattgttttgttggaatggtttggtgttagaatataaagttaatgattatttggttgggtatagtgtttttaaagtttttttatagtggtttatatgtgttaaggtagaagatataatgggtttttgttaattttttaataattggatattagaaggtttgcgtattggtaggggataaatggagaaaaggtgaagttatagttattagggtaggatatatttattatgtagtaatggaaggaaagaaataattttggtatttggggaaggaatattataggattttggagatgtaaagagaagggaaataatgttttttttgtttttatttagtattaaagtttggtaaatatttatatggtttatttaggttaagtagtaattgtggttggtaatttgatttgtggttgagtttgttattttattatgaaaatataaaaattttatttagtaggttagtataaaaaagaaaataaaaaaagaaaataaaaatttatatggatacggttagttttgaattatttttacgtgtttgatgatattaatattaatttttaaacgtagattttttttataggtgtgtaaatatatagattagtattattttttattaatgcggttgatataaattatatgttttttttgagattttaagggttttatttaggttatgttttgtttagtgattgaggttgtaattgtttagtgatattgtttatgtggtttaaattattgtaatggtaattaaatttgatggtgatttaaataaaaatttaataaaaattttggagtggtttgtatttttttaagtaatatgttagtgtaaggaagaatgggttataaaatatttttttattaattatggtagttaattttttttttttttttttgagatagagtttggttttgtcgtttaggttggaatgtaatggtgcgattttagtttattgtaatttttgttttttaggtttaagtgatttttttattttagtttttcgagtagttgggattataggtattcgttattatgttcggttaagttttgtatttttagttgagacggagttttattatgttggttaggttggtttcgaatttttgattttaggtgatttgttcgtttcggttttttaaattgtcgggattataggtgtgagttattgcgtttagtttggtaattatttttttaaaaaaatttttataagggtagtgggttattgtaattattggtaatgatattaaagattagagattaatttgaatttttgtgtataggttatagtggttaatagattggttttagattgtagtttagatgtttgaaataagatttttcggtgtttttaggatttatttataagtggttgaatttaggattttggagggtatggttgaggtaaatattgtaagttggttttattttgttgtttagagttttattgataataattttaattaaatgttgtaagggataaattgaaaagatgtgagtagttaggggagttgtatatttatgtgaaaatttgttagaagttaagattatagaatcgaggagtgagagaggttgttagattgttcgtgtttttatatattattttgggtatattaagaatgtaaggttttgattgtattttatttgggttattttttatggttgtgtttgtagtaagtaattttgagagaagaggtagtgtttttttttaggataaagaggaggtttgcgtattgttttttataaaatagtagattttttaagtttgtcgtttttttatttggatgtaatttattgtttgtgtagttatttatttaaatttatagcgttattttgtgggatttggatggtaagggaaattgtttttaatatgtattttattttttgtaataaagttttttgtttttaatttaggagttttattttttgttagtagttacgatataataataagttaatttattaatttttaaataaagtaattttgatagtttgtttttttgtttgttttttgtttaaagaattttatttttgatatttagtatttggatagtataagttaaaatttttaagaaaataaatttttttttataagaagagttttgttttataaaattttttggttattatatttgaatatttaaattgtttttgttttataggataaaggtatatagttaggtatttttttttttgttgatgtttgaaaattttgtagatataggaatttaggttttagaaaattttgtatttaaaaatttgtaattttttttggaaagttgaaagtatttttaaaagttataatttgtaagttaggtgatgtattgtagtataatttggaagatatgagggttgtttttttagatattaagaattttattgttttattattagagtaaaacgattttttttttagagaatgtatttcgttagaggttaatttattcgatattttaagtttttttttatcgtggttttttttttatagatttcgtttttttcgtattttcgggttaattagagggcggcgtttcgtcgcggttgttatggtgttcgtcgagttttttttattatttattagatgtgcggcggttcgtttaagcggtggaagcgggtggcgaaggatagtagcgttattaaggttagtagggtttattagtcgatcgtttcgaagcgtcgtgagttttaagtaggtcgtttggggtttcgcgttatagttttagcggttacgtttcggtttgcggttttagtagtttgggggttatagcggttttttcggggacgtagttcggattttgttaggttttcgttcgtggtcggcggtatttttttttttttttgggtcgtttttcggttcggaggtatattttgtttgattagtcgtttcgttaaggagttataagagggtagttcggggtatttcgggaaatgtaacgttttttattgtagcggagcgcggggtttcgggttcggggcggggcgggtagcgtggtcgcggttcgggtcgttaggaggcggtaggaggcgtagagtatgtcgggatcgggagggtcggtcggttcggggcgggggggattgggtaggaggggtcgggtttagggaattgtaatttttagtagtttttaggtacggggcgtggcgggagagttgggcgagttagaggcgatcggaaggatttttttagtttagtttttcgttttattcggacgaaagatacgggtttgattcgtcgagttttattgagttttagtcgtcggtaggttttaggcgcgaagtttttcggtttggaggagggggtcgcgcgaagtgttagatgtaggcggggaaggtttgtgacgcgtattcgggtggagggaagttggttagatatttggagattttggggggcggggttagaagtgagttgtatcgttcgtttaggtcgataacgattttcggtatgtagtgttttgcgtcgggtacgttttgcgtttgcgtgttgcgcgttgttcgttggggttcgaagtttcgggagggttgggttagaggaggcggttttggtagggagtgcgtagtagggtggagtcgttgttcggtcgcgttttatttttgtttcgttttttttgttttttataatagatttttttttttattaaggtttttaaacgtcgttttaagttttttaatttttcgtagttttttatgttttttttttggttttagtaggaggtgattttttagtaatgtttgtattttaagagttttcgggtcgggcgcggtggtttacgtttgtaattttagtattttgggaggtcgaggcgggcggattataaggttaggagatagagattattttggttaatacgatgaaattttgtttttattaaaatataaaaaaattagttaggcgtggtagcgggcgtttgtagttttagttattcgggaggttgaggtaggagaatagcgtgaatttaggaggcggagtttgtagtgagtcgagatcgcgttattgtattttagtttgggcgaaagagcgggatttcggtttaaaaaaaaaaaaaaaaggtttcgagcgaggagaggtagttatgataattatttggggagttttacggtttttatatgtttttttcggggtttgttttagagttattttgtttatttttggtggaacgggttcgagaatttgtatgtttttataagcggtttagatggtttttaacgtgttatgaagtttgagaattatttttgtggtattaaggaaggtggtacgttagatgggattttgcgttacgttaataatgtatagtttttttttttttaaatgggattttaggagttttttttttaaattatgtgtaagatatggtttaaaaataaaatttgttaaagtaattagaatgtatatttgaattggaaatataggttttttaggagtgttgatgagatggatatttgggtttaaagtttagttttataagtgtagaaaggaacggggtatggtttatatagttattattggtaagagaaggtagaaattgtttaagagattttaggttttttgtttgtgggtcgtgacggagggtagtagtatttattatgtttttggttattcgtagtatagatttaaaggtgtaatttaaaggtatttagttattaggtaaggtatttttttagggattttaagttaattaatgtttgttatattttagtggttattagtagtttttgttttttggtattaggagtttttgtagtttggttaggtaaggaaagggagttgtatttttaaataaggaagatttagttgtggttatttaatttttttttttcgaaagatattttttgtttattatttgttttttgtgttaggattatttttattttttttataaaaggtatttttaggataggttgggattgttgggtttgggaattattttggaagggtttaggtttttatttatatttttgttatttagtagattgagttggtagtatagggatggtaatagtaagtttagagagtagtttaatatgttaggggtggtagaggggagagggagttttggtgaaatgtttatagttagaggggtagtaaatagggtatttgagaagtttttttaagtttttttttatttatagggatatatatgttttggtgggaagatttatgagtgttaattattggcgagttttttttgggttttattttgaaatgttggttttcgaagaagtattagagaaattaattttgagttttttaaattttggagtagagatcgtatatttagttgtttttaagggtttaaaggtaataaaaatgagaaaagtgggttagatatgggttatggtagatttgagagcgtatacgttggttgatgggggttattagtttgtttttattaattgttgttatttaggaatttaaatttgtttttagatttttttaaagaaaaaaaataaataggtgttgtatataaaatattatgatttttatttttattttattttattatttatttattttgagatggagttttgttttgttttttaggttggagggtagtgatacgattttggtttattgtatttttcgttttttgggtttaagtaatttttatattttagttttttaagtaggtgtgattatagatgtatattattatatttggttaatttttgtttagttatgttgtttcgttatgttggttaggttggtttcgaatttttgattttaggtgatttgttggttttagttttttaaagtgttgggattataggtatgatttattatattagaatgaaatgttttgatttttaaatattggtaattatttgaaatattttaaattattgtgttgagtaaatagaaattttgagggttagatagggttttagtgagttgttagtttttgattttatttttggggtgagtgagtatatttgttagttgtttttatggggatagtcgagagttcggaggattgttgggaggtggggttgaaggagatatgtattaaagcgttaaaaaattagaattttttgttttgttgtattgttagaggatgttttgttattattttagggtaatttttgttttataaatgagggagtcgaagatttaaaaaggtagaggtttgtttaaggttatgtagagttggtttttgtattaggtttagattttagatgttagtttttagttcgttttattatttaaaatattgtattaaaattaggttacgttttgttggggggatattaaatttggttttagtaggagcgtaagaaattttttgcgagttggaaaaaaatgttttttttttttttttttttttgagacgtagtttcgttttggagtgtagtggtgcgatttcggtttattgtgatttttattttttaggtttaagttatttttttattttaattttttgagtagttgagattataggtatttattattatatttggttgatttttttttgtatttttagtagagatagggttttattatgttggttaggttggttttaaattttttattttaaatgatttatttattttggttttcgaagtgttgggattataggcgtgagttattgtgtttggttagaaatgttttttttgattagagttaaagtttttttaatgtttgggtagtttagtttttttattggtttttgaaatttatttttttaggttttttttttttgtttagaagttgtgttagaggggatattttttgggaggttgagggttattacgatattatgatagagtttggtaaggtatggaaggtatttttaggttagttgtttttttgggggttttttggattttaggagtttaaattagtataattttggagttaagggattttatgagttttttagagagtttggagtttgttttgatttgtatagatgtaggtttgagagaggaggtttggtaggataggaagaaatggttgattttttttaagttggagtttatttagtatgggttaatacgcgtttttattttttttttttttagt

SEQ ID NO: 98 - DNA, 8805 bp, Artificial Sequence
  chemically treated genomic DNA (Homo sapiens)
gttgaggagagagaggatgaaggcgcgtgttaatttatgttgggtgggttttagtttgggaggagttaattatttttttttgttttgttaggtttttttttttaggtttgtatttgtgtaaattagggtagattttaagttttttgagaggtttatgaggttttttggttttaaaattatgttggtttgagtttttgaggtttaagaggtttttaaaggggtagttagtttgagagtgttttttatattttgttagattttgttatggtatcgtggtgatttttagttttttaggaaatgttttttttggtatagtttttgagtagggaaaggaaatttaaaggggtggattttaggagttaatggggaagttgggttatttaggtattgggggaattttgattttggttagaaagggtatttttggttaggtatagtggtttacgtttgtaattttagtatttcgggagttaaggtgggtggattatttgaggtgaggagtttgagattagtttggttaatatggtgaaattttgtttttattgaaaatataaaaaaaaattagttaggtgtggtagtgggtgtttgtaattttagttatttaggaggttgaggtaagagaatagtttgaatttgagaggtggaggttatagtgggtcgagatcgtattattgtattttagagcgagattgcgttttaaaaaaaaaaaaaaaaaaaaggtatttttttttaattcgtaggaagttttttacgtttttgttggggttaggtttggtgtttttttaatagagcgtggtttggttttgatgtagtattttgagtggtggagcgggttgggagttggtatttggagtttggatttggtgtaggaattagttttgtatgattttggataaatttttgtttttttaaattttcggtttttttatttgtaaaataaaggttgttttaaaatgatggtagggtattttttagtaatgtagtaagataaggaattttaattttttgacgttttggtatatattttttttaattttattttttagtagtttttcgggttttcggttgtttttataaaaatagttggtagatatgtttatttattttaaaggtgaggttaaaagttggtagtttattggggttttatttggtttttagaatttttgtttgtttaatatagtagtttaaaatgttttaagtagttgttaatgtttaaaaattaggatattttattttagtatggtgggttatgtttgtaattttagtattttgggaggttgaggttagtagattatttgaggttaggagttcgagattagtttggttaatatggcgaaataatatggttaaataaaaattagttaggtgtggtggtgtgtatttgtaattatatttatttgggaggttgaggtatgagaattgtttgaatttaggaggcggaggatatagtgagttaagatcgtgttattgttttttagtttgggggatagagtaagattttattttaaaataaataaataataaaataaaataaaaataaaaattatgatattttatatataatatttgtttgttttttttttttaaaaaaatttggagatagatttgggtttttaaatagtagtaattgatgggaatagattaatggtttttattaattagcgtatgcgtttttaggtttgttatggtttatatttggtttattttttttatttttgttatttttgggtttttgggggtagttgggtgtgcgatttttattttaaggtttaaggggtttaaagttaatttttttggtattttttcgggagttagtattttaaagtggaatttaggaaagattcgttagtgattagtatttatgaatttttttattaaaatatgtgtatttttatggataggggagaatttgaaagaattttttagatgttttgtttattatttttttgattatagatattttattaaagtttttttttttttttgttatttttagtatattaagttgttttttgaatttgttattgttatttttgtattattaatttagtttgttagatggtaagggtgtaagtgggaatttaggtttttttaagatggtttttaagtttagtagttttagtttgttttgaaggtattttttgtggagaaagtaaagatggttttggtatagaaagtaggtgatgggtagaaagtgtttttcgaagaggaggaattgggtggttataattggattttttttatttggagatgtaattttttttttttatttagttaggttatagggatttttggtgttaagggatagggattgttggtgattattagagtgtggtagatattaattagtttagaatttttgaagaaatgttttatttaatggttaaatgtttttggattatatttttggatttgtattacgagtgattagaagtatggtaaatgttgttgtttttcgttacgatttataagtaggaaatttgaaattttttaggtaatttttgtttttttttattagtgataattatgtaaattatgtttcgtttttttttgtatttgtagaattaaattttaagtttaagtatttattttattagtatttttagaagatttgtgtttttaatttaaatatgtattttgattattttagtagattttatttttaaattatgttttatatatgatttgagaaaaagatttttaaaattttatttggaagagggaggattatatattattaacgtgacgtaaagttttatttaacgtgttattttttttagtgttataaaagtggtttttaaattttatggtacgttaagaattatttagatcgtttataaaaatatgtagattttcgagttcgttttattagagatgaatagagtggttttggagtaggtttcgggaagaatatgtgaaagtcgtgaagttttttaggtgattgttatgattgttttttttcgttcggggttttttttttttttttttgagtcggagtttcgttttttcgtttaggttggagtgtagtggcgcgatttcggtttattgtaagtttcgttttttgggtttacgttatttttttgttttagtttttcgagtagttgggattataggcgttcgttattacgtttggttaatttttttgtattttaatagagatagggttttatcgtgttagttaggatggtttttattttttgattttgtgattcgttcgtttcggttttttaaagtgttgggattataggcgtgagttatcgcgttcggttcggggatttttaaaatataaatattattggaaggttattttttgttagggttaagagaagagtatgaagggttgcgagaaattgggaggtttggggcgacgtttggaagttttagtggagggaggggtttgttatggggagtagggagggcggagtagaagtgaagcgcgatcggatagcgattttattttgttacgtattttttattaggatcgttttttttggtttaattttttcggaatttcgagttttagcgggtagcgcgtagtacgtaggcgtagagcgtgttcggcgtaaagtattgtatgtcgggagtcgttgtcggtttgggcgggcggtgtagtttatttttgatttcgttttttagggtttttaggtgtttaattagtttttttttattcgggtgcgcgttatagatttttttcgtttgtatttggtatttcgcgcgatttttttttttaggtcgagaaatttcgcgtttgggatttgtcgacgattaaggtttagtgagattcgacgaattaggttcgtgtttttcgttcgggtaaagcgaggggttggattagaaagattttttcggtcgtttttggttcgtttagttttttcgttacgtttcgtatttgggggttgttgggagttgtagttttttgagttcgattttttttgtttagtttttttcgtttcgggtcggtcggttttttcggtttcgatatgttttgcgttttttgtcgttttttagcggttcgggtcgcgattacgttgttcgtttcgtttcgagttcggggtttcgcgtttcgttgtagtgaagggcgttgtatttttcggggtatttcgagttgtttttttgtgattttttggcggggcggttggttagataaagtgtgttttcgggtcggagggcgatttagaggagggggaagatgtcgtcggttacgggcggaggtttggtagagttcgagttgcgttttcggaggggtcgttgtggtttttaggttgttagggtcgtaggtcgggacgtggtcgttgaggttgtggcgcgaagttttaaacggtttgtttggggtttacggcgtttcgaggcggtcggttggtgggttttgttggttttggtgacgttgttgtttttcgttattcgtttttatcgtttggacgagtcgtcgtatatttggtgagtgatgggagggattcggcgggtattatggtaatcgcgacgggacgtcgttttttgattggttcgagggtacggagggggcgggatttataggaggagggttacggtggaggggaatttgaggtatcgggtgggttggtttttggcgaggtgtattttttgggagggggatcgttttgttttggtggtggggtagtgggatttttagtatttgaggaagtagtttttatgttttttaggttatgttatagtgtattatttggtttgtaaattgtggtttttaaaggtgtttttaattttttaaagagaattgtaaatttttgggtatagaattttttaaggtttgagtttttatgtttgtaggatttttaggtattaatagaggagaaaatatttaattgtgtatttttattttatagggtaaggatagtttgggtgtttaggtatggtgattaaaggattttatgaggtagaattttttttgtgagaagagatttatttttttaaaggttttagtttgtattatttagatattgggtgttagaaatggaattttttaagtaaaaagtaggtaagaaaatagattgttagggttgttttatttagaaattaataaattagtttgttattgtgtcgtgattgttggtagaagatgagatttttgggttagagataaaggattttattataggaaataggatgtatgttagaagtagttttttttgttatttaagttttatagggtgacgttatgggtttaaatggatgattgtataggtagtgggttgtatttaagtgaaggaacgataagtttggaaaatttgttgttttatagaaggtagtacgtagattttttttttgttttggagggagatattgtttttttttttaaagttgtttgttgtaaatataattatgagaaatggtttaggtgagatgtagttagggttttgtatttttggtatatttagaatgatgtgtagaggtacgagtaatttgatagttttttttatttttcgattttatggttttggtttttagtagatttttatatgaatatataatttttttggttatttatatttttttagtttgttttttatagtatttaattaaggttgttgttaatgggattttaagtagtagaataaggttagtttatagtatttattttaattatgttttttagggttttggatttagttatttgtgaataagttttgggggtatcgaggaattttattttagatatttgggttgtagtttaagattagtttattaattattgtgatttgtgtataggggtttagattgatttttgatttttggtgttattattagtaattataatagtttattatttttgtaaaaatttttttaagaaagtaattattaggttgggcgtagtggtttatatttgtaatttcggtagtttgggaggtcgaggcgggtagattatttgaggttaggagttcgagattaatttggttaatatggtgaaatttcgttttaattgaaaatataagatttagtcgggtatgatggcgggtgtttgtaattttagttattcgggaggttgaggtgggagaattatttgaatttgggaagtagaggttgtagtgagttaagatcgtattattgtattttagtttaggcgataaagttagattttgttttaaaaaaaaaaaaaaaaaattaattattatgattaatggaaagatattttgtgatttatttttttttatattaatatattatttggaggagtgtaggttattttaggatttttgttagatttttatttggattattattaaatttgattattattatagtggtttaaattatatgggtagtgttattgaatagttgtagttttaattattagataaggtataatttaagtaaggtttttaggattttaggagaagtatgtgatttgtattagtcgtattgatagaaggtggtgttgatttgtgtgtttgtatatttatgagggaggtttgcgtttgggagttggtgttgatgttattaggtacgtgggaatagtttaagattggtcgtgtttatgtgagtttttgttttttttttttatttttttttttatattgatttgttagataaagtttttatgtttttatagtgagatgataaatttagttataggttagattgttagttatagttgttgtttgatttagatggattatgtgaatgtttgttaggttttggtgttggatagggataaagagaatattgttttttttttttttatatttttagggttttgtggtgttttttttttagatgttaggattgtttttttttttttattgttatataatgagtgtgttttattttagtaattataattttattttttttttatttattttttattaatacgtaggttttttaatatttaattgttagaaaattgatagaggtttattatgttttttattttgatatatgtgggttattgtagggggattttaaaagtattatatttaattaaatgattattaattttatgttttggtattaggttattttaataagataatttagtgattgaattagaattaagtttgaattatatagatagttttttttttttagttgatttgggttttttgtaagggggaagaaagatgaattatggttagaaatggttaggggagaattttatatttttaaaataggtttatataattttttattttttttttttgattattatttagttggtaggtaaaaggagatgatttatttttgagaatggttgttttaggtgattaaattgttttagtaaggtttgtagattaggaggaggttaaaaatatagaattaaaaatttttttgagttgatttttgagggaattgtttagtatttgataatgttatgtttgtggatggtagggagtgtgggaggtttatcgaatattttggttattgattgttgatattgttgggtggttattgcgataaaaagatatgttagtgttagattgtagatggtttggaaagtagaaaatttggtagtttagttttaagggttatagtggtatatatagagttagataattggattggaaaagtaatattagtattgtaaattgaaaaagtattagtagtagtaaggtattgatgagagtttagagaagggaataaagttttaatgttaattttttaggagtaggtgtggttagtgttttttgtaatgtggttttttttattgtaagataagtaggttaatttttggtaggagttataagtttggtacgtagtggtggtttttgttttagaaatatgtagttttttacgttgtgtttagtttatgatggtagatgtttttatatcggttgtatgaatttaggtggttatggtagtagttttggtggtgtaggttggattagtagtttgattttagttagttttacgagagtatttgtttttagtgtgggtatttacgtgagtgatttagtttgttttattggtaggtagttatgatgtgtttttatattttttagtttttattttttagtatttagttttttaagtggtatattaaatgttttaatttttattgttattagttatttagagttattattggggttaagtgtttgttgttgtttggtgggtaatattagtttttaatttagtttaattattggtgagttaggtttaagtatttataggaatttttgtgaattaagggttttattgaatagtagttcggttttaggtagtagagaaggttgttttttttagagtgggagttgttatttttttacgtaaaattaagatgtttttagggttaggttagttatatttttttttttttttttttttttttttagagatgagatttgattttgttgtttagtttggagtggagtggtataattatagtttattgtatttttaaatttttgggttttttttgttttagttttttgagtagttggtattataggtacgtgttattatgtttagttaattaaaatagattttttaagagttgagtttttattattttgttaaggttggttttgaatttttgattttaagttatttttttgttttagttttttgaatagttgggattattagttgtatttttgaatgtattatttttataggattagtgaggtttgttaaattttttttttgttattagtagatttttattgatttattttaaagtgggaatattaggttagggagttttgaggtttttatgggtttggtaattaattttaaagtgttgagtagttaattaaggagttaatagttgtttttttaaaaagggtgtgtttggtatttatgtttagtaggtggtattgtgattttggtgta

SEQ ID NO: 99 - DNA, 18133 bp, Artificial Sequence
  chemically treated genomic DNA (Homo sapiens)
tttgtatatgatgaaaagtgaagtattatttgtaatgcgtagttttattagtagaattttatagttaaatgatgttagtttaatgttgatatttttagatggttttaatagaaaattagttgtattagtcggggttttttataaaaatagaagtaataggatgtatttggatttatttcgatttatttatatgtttatatgcgaggttgggagagatttatttattttaaggaattggtttacgtaattgtggaggtttgttgagtttaaaatttgaaggtgtaggtttgcggtttgaagatttagggaggagttgtagttttaatttaaaggtaatgtgttggagaatgtttttttgattaggggaggttagtgtttgttttattaaggtttttagttgatgaggtttatttatattatggagggtaatatgtttttttaaaatttatcgatttaaatattaattttatataaaaaatatttttatagaaatatttagaagaatgtttgattaaatatatgggttaagttgatatataaaattaattattatggttaggtacggtggtttacgtttgtaattttagcgttttgggagattgaggtaggtagattacgaggttaggagttttagatcggtttggttaatatggtgaaattttatttttattaaaaatataaaaattagttcgacgtggtggtatatatttgtaattttagttatttaggaggttaaggtaggagaattgtttgaattcgggaggtggaggttgtagtgagtttagatcgcgttattgtattttagtttgggttatagggtaagattttgttttaaaaaaaaagaaaaagaaagaaattaattattatgttagttaattttaattatggtttaattttatattttatttatggaataaaagtaaagtttatggaggtcgggtacggtggtttatgtttgtaattttagtattttgggaggtcgaggcgggtagattatttaaggttaggagatcgagattattttggttaatacggtgaaatttcgtttttattaaaaaatataaaaaaaattagttaggcgtggtggtaggtgtttgtagttttagttattcgggaggttgaggtaggagaatggcgtgaattcgggaggtagagtttgtagtgagtcgagatcgcgttattgtattttagtttgggtgatagagcgagatttcgtattaaaaaaaaaaaaaaaaaaaaagtaaagtttatggaaagttattttgatgaaagtgaaatatttggtattattgagaaaattattattaatttattgaaaaagtaaatatttagtataaatatttttgtgatgattgttttttatagaaatataaattttggcggagtatagtattatggttaaaaatagattttttaataaagaaatttttagagaagaaatatagttggatttggttgtggcgtataaataatttataattgtgtttaaataagtcgattataaaattgtttttggttgggtgtagtggtttatgtttgtaattttattattttgggaggtcgaggtaggcggattatttgaggttaggagttcgagattagtttgattaatatggtgaaattttgtttttattaaagatataaaaattagtcgggtgtggtggcgtgtaattgtagttttagttattcgggaggttgagaaaggagaattgtttgaatttggaaggtagaggttgtagtgagttgagattatatcgttggattttagtttgggtgatagagtaagattttattttaaaaaaaaaaaaattgtttttggaaaggtatcgggaagaggaattttaggttatatttatgttttttttatttttttttgtatgtagatattttagtaaagaatagtgatatatttagtatataggacgtttagagtagataattttttaatattttttatttttatgataaaattatttttaataataattatataataattaggaataattatttttttgtttttgtttgtagtgggaaaataatattttagaagaatatatttttattttaaatataatgtggaaatttagtaaattattttatatgtgaattagatttttatttattaagaaaaagttttatattttgtagattgtagtgtttgttgttttttattttaaatataaataaaaagtttaaattgttatatagaatgataagattgaaagaatagtattgtttttttgtttttataattatttggttattattatttgttttaaatttattattaaaatataggagtatttggtattgtaggatttggagaaaggaattgtaagttagaggtaagttggaaggattttgaattgttgggtatttaatttagaaataaatttgagtagttgagattatatgtgttaggggacgaatatataatcggaagttttttgaattaattttttgatagaatataatgtttgttaaaaggataagtaatgaaaatgttttaatatgaattttaagttttatgttaaatagaaatgtatttatatatttattaaaagatatgtataaaatgtttatagtagtattatttttaatagtttaaatttggaaattgtttaaatgtttattaataggggaatggataagaagttttagaggtaggttgggcgtggtggtttatatttgtaattttattattttgggaagttaaaatgggcggattatttggggttaggagtttaagattagtttggttaatatggtgaaattttattttttattaaaaatataaatattagttaggtttggtgttatacgtttgtagttttagttattcgggaagttgaggtaggagaattgtttgaattcgggaggtagaggttgtagtgagttgagattatttaattgtattttagtagagtagtagagcgagattttgttttaaaaaaaaaaaaaaaagttttagaggttagaagaaagtgaattgtttaaggtaaaattattatggaatacgtaatattggtattattatgtattgagttaagttttatgttaggtatttttgtatatattattttgtttaatttttattatattttgtgatagagatattaattttatttgacgtataagaaattaagtacgtagggattaaggattttgtttaaagttaaaatgttataatagtggggaatttaggatttgaatttagtttaaagtttatatattttttttttattatagtttgttgtttttttaggataaagagggaagatagggaaagtagggaagtatggattttataaatttatatatgttaaaattataatagttattgttttttgagtatttattatgtggtaaatattatatgaggtattttatataaatgatttttagaattttcgtaaaattttttatggtagtagttattattttttttttttttttttttttttttttttgagataggatatttttttgttgtttaggttggagtgtagtggtatagttttggtttattgtagtttggattttttgggtttaagttatttttttattttagttttttaagtagttggggttataggtatatggttattaggtttagataattttttatttttgtagagattgagttttattatgttatttaggtttattatttttattttttagatgaagagattgaggtttagagaagtttaatgatttgtttagttttataaattttttgttattatatattttttagcgtttttaataagagggaggttattaattatgtgttgggtattgtggtggatgttggagttatagggttgagtatataagaaatggtgttgttggagtaattgttgtttgtttatttgatttatttgagaattaattagtaggggaatatatttttgtttttagatttaatataagaatttgtgtgggtaaaaataaagattagtagtaataatagtagtttttatttgttgattgtattgttttaagtgtatatatatatatatatatatacgtatatttatatttttttaatatttaaaatgattttgtttatgtattgttaatatgtttattttatttttaaatttttatttatttttatttttatttatttttgagacggagttttattttgtcgcggaggttgaagtgtagtggtgcgattttagtttagtgcgattttcgtttttcgggtttaagtgatttttttgttttagttttcggattagttgggattataggcgttcgtttttacgtttagttaatttttgtatttttagtagagatggggtttcgttatgttggttaggttggtttcgtatttttgattttgagtgatttatttgtttcggttttttaaagtgttgggattataggtatgagttatcgcgtcgggttaatatgtttattttagtgaggtaaaaatagaggtttagagtttgatttgtataaaattatagagtagttaagtgtttttttagatgtgtattttgatttgggtgattttaggattttaggttttaattgttataattagttaagggtttggggaagtattgggttaagagttaggaaaatggaagttataggtagtgtaaggttttgggaatgggacgtttggtttaaggatttacgcgatgattggaattcgaagagtcggggttcggtttacggtcgttatgaagtaacgcgcgtcggtaggtttgggaattagggagttttttgaataggagattgagttgggagggaaaggggtttcgttgggggagtttcggttttttttgggagaaaatttttacggttatttagtgagtttgtaaattggtaggcgtcggcgtaggcgcgcgggcggggtcgggggcggggtttgcggggcgtggcggggcgggtagagggcggggtttgtttttttttagttttaggcggttgcgacgagtttttaggcgaatttttcggttttttcgcgcggcgtcgttttttgttgcgttttcgtttttttttttgtttcgttatcggttttttttttttgagtagttagttcgcgcgtcggtcggtttcgttatggcgattcgtagttttggcgtcgtggtgagtagttcggtttgtcggttttggtcggtttaggtttacgcggtaggtggcggtcgggttttgaggcgcgggattcgtagtgcgggttcgggcggtcgggtttagggaatttcgtaggcgggggcggttagtttttcgggttcggttttacgttacgcgagggcggtagggaggacggaatggcggggtttggggtgggttttttttcgggggagttttgggaaaagaggattgcgtgtgggaagagaaggtggaaatggcgttttggttgatatgtgtcgtttgcgagcgtgttgcggggaggggtcgagggtagattcgggaatgatggcgcggggtgggggcgtgggggttttttcgggagaggtttttttttggaagtttggggtgcgatggtgaggttttcggggtatttttggaggggtttcggtacggaaagcgattatttgggagggcgtgtggggattaggttttgtttttagttttgtatatattgtagtttatttttatggagatgtttatggttttattgaagttttattatagttttggtagcggtaattatgcgtatttgatatacgaaggaattagggaaaaggtattaggttattttaagtcgaaatttatatgtgttagaatttagattttatgttgatcgatgttttaggatatagaaaatgagaatttggtttttatttttaagaatatttttaatcgtaattagtttttggtattttagttttatttttattggtttttttttgtttgttgaatcggttaagttgttggtttttttttttaatcgttttgattatgtttgttaaaatagttaaaatttcggttagttaaatatgttttagtttgttttattatgattatttttgttgttttggtaatgatttggttatttgttgttttttttattaaaattttttaagggtaggaattatcgtcgtaattttagtatttagtatagtatttggtttgtaagaggttttcgatgatggtttgttgaatgaatatattaaataattaattatttgaattttaagaaagaagcgattttattttatattaggtattgtaatgatttaaggtaaagagtagtgttattaacggagtttaattgggaatttagtttgtttgggttatttattagttgtgtggttgtgggtaatttattttatttttttgggtttaagttattttatgtatatttgaggtgttggttattttttggagttattgagaggattataagatagtttatgtgaattagtaatttttgtatggtttttggcggggaatagtaataatagttattattatgtttatttatatagttttaattagtttttaaaatagttttgtagtaatggtatgattattattattttatagatgaggaatttttgaagttttagagaggttaatagatatattttaggttatatagttattaagagaaggagttttgtttcgaatttagttttttttttttcgagtaatattagttaaaaaataggttataaataggtatttaaaaaaatggtagtggttgttgtttttatttagttgttgaggaaaaaatgttgattttttatttttaaatattaatttatttaattttgttaattttttttttttgagatagggttttattttgttatttaggatggagtgtagtggtataattattgtttattgtagtttcgatttttcgggttcgggtgattttttttaggtttaggggatttttttattttagttttttaagtagttgggattataggtgcgtattattatttttggttaatatttgtattttattttatttatttatttatttattttttgagatggagtttcgtttttgttgttcgggttggagtatagtggtatgatttcggtttagtgtaatttttgtttttcgggtttaagcgatttttttattttatttttttgagtagttgggattataggcgtttgttattatgtttggttaattttttgtatttttaatagagacgaggttttattatgttggttaggttattttcgaatttttgattttaggtgatttattcgttttggttttttaaagtgttgggattataggcgtgagttattgcgttcggtttaatatttgtattttttgtagagatggtgttttgttatgttgtttaggttggttttgaatttttgagtttaagcgatttgttcgtttttgttttttaaagtgttgggattataggtatgagttatcgtgtttggtttaggtagacgtttttagttttggggtgtgatgtttgttttagtatatagtgaatttaattattgttagagttggttgtttgttagttttttttgaatataagatatttattgtttttagtttgtaaatttttttttttttttaaaaaattttttttttttaaattgtttgtatgttagtaataataaatgtttaaatggtgttatgtgttagatatttttttaagttttgttatgtatattaattaattttttaaattatataaattagagaggttaagtaatttgtttaagattatttaataatattaggatttgaatttaagtttgttttattttagattttgtttttaatttttaaatttttaagttagtagtgataatagtaggtatttattgaatatttaattatgttttaggcgttgaagtaaatattttgtaggtattatttaatgtaaatattttaaagttatataataggtattttttaggtaaataaatattagtatgattttggaggtatagatagttgaagtaatttgtttaatattatttatatgaaattggtttttaaatgtgtttgatataatttatgttgtttgtaattatcgttttaaattgttagggtaaatttggatatatttgagttaagaaaaagtttttagatttttgtaaattaatgtgaaagatatgttttatgtggatataatattttttaaatttcggggatggtagttttagaaatgtaattttgttttagtcgagtttattttgttaataattttttatagaattggtaaaacggagtattttttttttgtttttggttatattgttattaatagggtgtagattgatattaatttgtaggtgtaaattagaattattttttgtgattattaggaaatagagtagtttagtttaggggtttttttttgtgaatttagtattgtgatttgtatattataagtttattttgttttttatttattgtttgtatttgggtattgtaaaaggtaggaaaaggattaattagattagtagagaagagttgttttggagtttttttttagttttttgtagtttattagatagtaattaggttatgttattttatttttttgtagtgaagatatgttgaagttgtattggtatatttttttatttttttgtaattttatattgtgtagatttgataaaatttatgtgttaattattattattaatattaatattgagttttaatttttatttttttgtttagtggttgttaaattattaatatttataataatttattattattaagataatttattagttcgattatatattttaaattgttatggaattattgtttttagtattgtgtttttgataattgataagtataattttttttttgtttagagtgaatatgtttatttttttattgtatatattaataaaaggaaaaattgtaatattgggtaaatttatgtttttatatatgtagtagttatgagtttatgtttttagaatgagtaataatttattttttttttggttgaatagttaagaatgttgattttaatttttttaatagttttattttttagaagggaaggtaagtaagttatatatgtagtttatttgtaagattgatatgaaattggaagatgaatttattattagttttaattatttttatatttaggaatattgtattagtaatttataattttggttttttgttattttgagttaatataaattatttaaggagatggcggattatttgttttgaggtgtttttttttgagaattttaatgtatttgaatataaaaggtaaaaatatgttaattagtaatttttgtttattttagaagtttggaaatattatttattattaggaattaaataaaatatggtttatttattgttatattttttttaatttatatagtttatttttattttttatttttgtttgttttttttgagatggagttttgttttgttattaggtaggagtgtagtgatgtaatttcggtttattttagttatcgattttttggtttaagcgatttttttgtttgagttttttgagtagttgggattataggtaggtattattacgtttagttaatttttgtagagataggattttatcgtgttggttaggatggtttttattttttgattttatgatttgtttgtttcggttttttaaagtgttgggattataggtgggagttattacgtttggtttatatagtttatttttagatttatttttattaagttttgtttggatttacgaatattgtttttttttttttaagatggagttttatttttgttgtttagattgtagtgtaatggtgtaattttagtttattgtaatttttgttttttgggttttagtaatttttttgttttagtttttcgagtagttggaattataggcgttcgttattacgtttagttaatttttgtgtttttagtagagacggggttttattatgttgggtaggttaggggtgattcgtttattttagttttttaaagtgttgggattataggtgtgagttatcgtatttggttaatatgtttttttttttttttttttttttaattataaagagatttaagtagtttttgttatagatgatgaattgatgttgtaagtattgttttagtttggattaatttttttgtttattgtaattttagataatatagttttgtaattagagattttatgtgtaaattataaaaatgtttatatgaaggttattattatagatgtgacgtgtataattattagtaatttgtatgtttatatgggttagtttggtaaaaaattatgaagttttaaaaattaaaaaaaattataatgttagttttattggaaagtaaaattattttagtaatcgattatagtaaaagtattgatttttattttagataaaagttagaatgaaaggtaattttttaatatttttttagattaataaaagtatttgtagcgatttttattatttataagtatattataagtaagttagaatttgagaattgtgttttagatttttgaggagatgtagttagatttttgaattgttttagtaaatggtaagtaatttagagttagtaattaataatttgttttttgatttttgatttagttaagaatggttatatttgggaaaggtagatttggagagtaattacgtttttatttatttattatttttaggtttttttagagtttttagatattttggggttgagtttttttttaaagttatataggattttttttttgtgatttgttttagttatttttatgttgggtgtttgttatggattgagtatttatgtttttttatattttttttatattttttttgaagttttaatttttagtgtgatggtatttggagatagggtttttggaaggtaattatagttagaagaagtcgggagggttgggtttaggtttgattggattagtgtttttatatgaaaagatattaggacgggcgtagtggtttatatttgtaattttagtattttgggaggttaaggtgggtggattacgaggttaggagtttgagattagtttggttaatgtagtgaaatattatttttattaaaaatataaaaattagttgggtgtggtagcgggtttttgttatttaagttattcgggagggtgaggtatgagaattatttgaattcgggagttggaggttgtagtgagtttagattgtgttattgtattttagtttgggtgatagagtgagattttgttttaaaaaagaaaaaaaaaaaaaaagagatattagagagtttgttagaagaggttatgtgagtatatagttagaagatttttaagttaaagaagaggtttgagattgaaatttattttgtaggtattttaattttggattttttagtttttaaaattgtgagaaataagtttttgttaagttatttagtttgtggtattttgttatggtagtttgagtaggtagttgtttttttagaaggtgttgataataattatatgtaatattaagttataaataataaaatagatgtaatttatatttatatagaaagttgggtattgttattgttttgttggtttatacggttgtgttagtttagtagtagaaaggtgttggttttttttatttagtttataatttaggtagtagaatgtaattattgttttaaatttgatattgtttagggagagaattattggtgttgggtaattttgggttttaggtttattttttgtgtatatataattgtttttggtaaattataagtttttgggtttgtcgaattagattttgttatagattatgagttttattatgttatatagttagttgtatgtatatatgttttttttattagattttaagttttttttttttttttttttttgtgacggagttttgtttttgtcgtttaggttgaagtggagtgtagtggtataatttcggtttattgtagtttttattttttaggtttaagcgatttttttgtttcggttttttaagtaattgggattataggtacgtgttattatattcggttaatttttgtattttttgtagagatagggtttcgttatgttggttaggttggttttgaatttttggttttaggtgatttattcgttttagttttttaaagtgttgggatttataggtatgagttattacgtttagttataagttttttaagggttgtaaatttataattatttttttatttttttgtaaattttgttgtatattgttttaattaaggtagatgttgaatgtatttttgtataattgaatatgttgtaatttttaattttttttaattgtttttgttaaagtagttattggattgttaattaatttatattagatggggttaattaatattagatgggataagtaagggttaataagattataggttattaagtagatttttgtttagtttttatagagattgagtttattggatttgtttgataggaagttttggtgtttgggatgattaaaattgaagtttttatttattgaattatatttatttatattattttatattagtggtttatatgtaagtgaggtttttgagatagagtttgagttttttttttaattattataatatttaatttgtatttttttttttttttttttttttagacggagtttcgttttgttatttaggttggagtgtagtggtatgatttcggtttattgtaatttttgttttttggatttaagtagttttttatgttttagtttttttagtagttgggattataggtttgtgttattatgtttggttaattttttttttgtatttttagtagagacggggttttattacgttggttaggttggtttcgaatttttgatttcgagcgattaatttgttttggttttttaaagtgttgggattataggtatgagttatagcgtttagtcgtttttttttttaaatagtaatttaatattgtttatagttatttatgtatatgttatgttatttattatattgtaagttttgtgagggtagttgtattaaatttatttaattttttttagtatgtatgatatagtaagtatttaataaatatttgtatattagtgataaggatataggttttgaatagtgggtttttattatttaagaattagtatttgatggtcgggcggggtggtttacgtttgtaattttagtattttgggaggttgaggcgggcggattatgagattaggagatcgagattattttggttaatatggtgaaatttcgtttttataaaaaaaatataaaagaattaattaagtgtggtggtgggtgtttgtagttttagttattgttttgtgaggttgaggtaggtagattatttgaggtgggaaatttaagattagtttgattaatatggagaaattttatttttattaaaaatataaaattagtcgggcgtggtggcgtatgtttgtaattttagttattcgggaggttgaggtaggagaatggcgtgaattcgggaggcggagtttgtagtgagttaggatcgcgttattgtattttagtttgggcgatagagcgagatttcgttttaaaaaaaaaaaaaaaaaaaaaattagtatttgatatttgattattaaatatgaattaagaggatttagattttttgttaaatgttaagttgggaaaagttgttatttaaatgaattgttttttatttaatttcgtttgatgatatattttgtttttattttgtaaaaaattattttttttttttttggagatagggttttgttttgttgtttaggttggttataaatttttgattttaagtaatttttttgttttagttttttaaaatgttgggattataggcgtgagttatttcgttcggttttgtattatgatatattttgaataattataagtagatttggtataatgaatttgtacgtatttattgttaagttttgataattgtttgtttatagttaattatgtattttttaaattagaatttttttaatatatttaaatatatatatatgtgtgtatatatatagtaagttgtaataaagttgtgaatttatatttgaagtattttaagtgatgtaagttttatgaatttttgtttatgttttttgggaagagttgtattgataaattttttatgtttaaagtaaattataaattaaaaaaataaaatttaggatgtaataaaataaaataattttttgatataagtatggtatgtaaatttgttttgattggaaattaatttgttatattgttagaatttttgttttagaatatatttttgttgatttgtttgtatttttagattgtatatttgggatgaattttgggtagaatttatatgggttttttttgaaataaataagattttttaaatttttagtcgatttgtagaatttgtagttaggtattgaattattttgatagatgtagtaatcgttgtaagtgtatattttaaggagttttggttgggttttagtttatgtttgtggtagaagtagtgagtaattgggaggaagttggtgagtaagttttaaggaagaagttatttttagtattttggatttttttgattttaaagtattataaaatggtgtatttttatttttgttaagtgataatagatatattttgatgagtttgaaatgaatatatattgtattatttttataatatttagtaaggtttgtatttttttagaatttgaattaaattttagtttataaaatttataaaatatttagttgttgtaaaatatttttggaatgtttatataggtgatatataaatgttttatttttattttttttatagtaaatatgttttgatatgtgaaggtttagtagatgtattagtatttaattttagaggatttggtataatttttttttttaagaatagaaattttttttgtttatgaaagtagtatatgtttttttaaaaataaattaatattgatttttgtttgttgtatagtattatgtttttatttggttatgattaggggtatgttttggtttatttatttgaaaatgtttgtaattagttttttggttatgtgtataggggttgaagttgttttataggtattacgggttaatttgataatatatgaagttttattaaagtttgagaatttagaattgagttttggggattgaaagatagtataaattttaaattttttagtattggaaattttaaaatataattgaattttataaataagattttaagttttaaatatgtatttttaaatgtattaaaagttaagttgtttgtatttaagtatttaatataatgtttaggttgtaaaaggagatgtttaataggtattaattgatatattgagatttaattatggtttgattaatatttattggaaatcgttaaagtttaaattattagttttttgaatgtgatttgaaaggtaatttagtattgaatagtatgtgagttagagtattttattttttttggtttatttttttaaatagattttgaatataatggtgaatgggtattataaattaattaataaaaatgatattgaaaatgaaaaaatatatatattaaagtgtagaaagtgattaggcgtggtggtttatatttgtaatttaagtattttgggaggttgaggtaggaggattttttgattttaggagtttaagattagtttgggtaatatagcgagatttcgtttttaaaaaaaaaaaagagagagaaaaaaattttttttatttaaaaaaagtgtagaaagtgttaagattttattttttattattatttggtatatttttttatatttatttattttttttttttattttttttttttttttttaatttttttatttttttgtattttgattttttgtttgtatattttgttttaatttaatgtattttttaaaaattttttatatattttatatgtatatataaaaacgtatgttgttaaagataatttataagaaagattattgaatttttttaaaagtgatatatatttattgaaaaaaatttagaatatatagtaaagtaataaagaattaaataaaattgttgtaattttttttttaaagataagtgtttttatgattttgttgtatttttttttgtatataggtatatatatagtatttataaagttgtatttatagtatatttttatattataggtattatattagtgttattaaatattttgtatgttaggggttagatatattaagataattaatatgtggttttatttaaataatattagagtattttttatgatgatattttatgagttgattataataattttagatttttaagagtttgggtttttaaaagattatttagtttttttgggtgattttttttttttattgtgagatgagagaggttgtttggatttgggattggggtagcggggatagtaatttttttttttttttttttttttattttgaggtagggtattgttgtgttatttaggttggagtgtagtggtgtgatttcggtttattgtaatttttatttttcgggtttaggtgatttttttgttttagtttttttagtaattgggattataggcgcgtgttatatgtttggttaattttgtatttttagtagagatggggttttattatgttggttaggttggtttttaatttttgattttaggtgatacgtttatttgggttttttaaaatattgggattataggtatgagtcgttgtattagttagtagttttttttgtggttttttttgtttgttttgttttgttttgtttttgagatagggttttattttgttgtttacgttggagtgttgtggtatgatcgtagtttattgtagttttaaatttttgggtttaagtgattttttttgttttcgtttttcgagtagttgggattataggtatgtattattatatttggtaaatttttataaagttttttgtagggacggggttttgttatattttttatgtcggttttgaatttttggttttaagtaatttttttgttttagttttttaaagtattgggattataagtgtgagttattatattatgttagttttttttgtttagtgtgatattttattttgttagattatagtgtgttaaaatttgttttattaaatttttaaatatatttaaaagtggagagaatagtataatgaatattcgtatgtttattatttatgtttagaatattattaaatataaagattttgttgcgtttgttttagttttttaaaatttttttttttttttttgtgatttaaaggaaattttatattttattattttatttttatatttttgattaagatgattaagatatatagttatatggttttttgttttgttttttgttttttaaagacgaaatttcgtttttgttttttaggttggagtgtaatggtgttattttagtttagtgtaatttttgttttttgggtataagcgatttttttgttttagttttttaagtagttgggattataggtttttgttattacgtttggttaatttttgtatttttagtagagacggcggggggaggttttattatgttgataaggttggtttggaatttttgattttaggtgatttattcgtttcggttttttaaagtgttgggattataggcgtgagttatcgcgtttagtttgtttttttgtttgtttgttttgttttttttgagatagagttttgttttgttttttaggttggagtgaagtggcgtatttttggtttattgtaatttttattttttaggtttaagtgatttttttgttttagttttttaagtagttgggattataggtatgtgttattatattcggttaatttttttgtatttttagtagagacgggattttatcgtgttgtttaggttggtttcgaatttttgagtttaggtagtttgtttgttttagttttttaaagtgttgggattatacgtgtgaattaattcgttcggtttgttgtttttttatataatttattattatatttataaagttaatagttattaatattattttatatttaaatttttttgatagattaaggttattttttaatattttaatttaattaaatgtttgtattttgtaatgtttttattgaaatagttatattttttttttaga

SEQ ID NO: 100 - DNA, 18133 bp, Artificial Sequence
  chemically treated genomic DNA (Homo sapiens)
tttgaaaaagaaatatagttgttttaatgagagtattataggatataaatatttgattggattaagatgttaaaaaataattttagtttattagagaaatttaggtgtaagatgatattagtaattgttaattttgtaggtatgataatgaattatgtaagaaaataataggtcgggcgggttggtttatacgtgtaattttagtattttgggaggttgaggtaggtagattgtttgagtttaggagttcgagattagtttgggtaatacggtgaaatttcgtttttattaaaaatataaaaaaattagtcgggtgtggtgatatatgtttgtagttttagttatttgggaggttgaggtaggagaattatttgaatttgggaggtgaaggttgtagtgagttaagaatgcgttattttattttagtttgggaaatagagtaagattttgttttaaaaaaaataaaataaataaataaaaaaataggttgggcgcggtggtttacgtttgtaattttagtattttgggaggtcgaggcgggtggattatttgaggttaggagttttagattagttttgttaatatggtgaaattttttttcgtcgtttttattaaaaatataaaaattagttaggcgtggtggtaggagtttgtaattttagttatttgggaggttgaggtaggagaatcgtttgtatttagaaggtagaggttgtattgagttgagatggtattattgtattttagtttgggggataagagcgagatttcgtttttaaaaaataaaaaataaaataaaaaattatgtaattatatgttttagttattttagttaagaatgtagaagtaaagtgataagatatggaattttttttaggttataaagagaaaaagaaaaattttaaagagttaagataaacgtagtaaaatttttatatttaataatattttaaatatgggtgatgaatatacgggtatttattatattattttttttatttttgagtatgtttgaaaatttagtaaaataagttttaatatattgtagtttaataagataaaatattatattgaataggaaaaattggtatggtgtggtggtttatatttgtaattttagtgttttgggaggttgagataggagagttgtttgaggttaggagtttaagatcgatatggggaatgtagtaagatttcgtttttataaaaaattttgtaaaaatttgttaggtatggtggtgtatatttgtagttttagttattcgggaggcggaggtagaaggaattatttgagtttaggagtttgaggttgtagtgagttacgattatattatagtattttagcgtggataatagagtaagattttattttaaaaataaaataaaataaaataaataaaaaaaattataagaaaaattgttggttgatgtagcggtttatgtttgtaattttagtattttgggaggtttaggtgggcgtattatttgaggttaggagttagagattagtttggttaatatggtgaaattttatttttattaaaaatataaaattagttaggtatgtggtacgcgtttgtagttttagttattggggaggttgaagtaggaggattatttgagttcgggaggtggaggttgtagtgagtcgagattatattattgtattttagtttgggtgatatagtaatattttattttaaaataaaaaagaaaaagaaaagaaaagttgttgttttcgttattttaattttaaatttaaatagttttttttattttatagtaagggggaaaaattatttaaaaaagttaagtgattttttgaaaatttaaatttttagaagtttaagattattatagttaatttatgaagtgttattataaaagatattttaatattatttaagtagaattatatattggttgttttggtatgtttagtttttggtatataaaatatttaataatattgatatggtatttgtgatgtgaaaatgtattatgagtatagttttataaatattatatatgtatttatatatagaaaaaaatataataaaattataaaagtatttatttttgaaagaggagttatagtaattttatttagttttttattgttttgttatatattttaaattttttttaatgaatatatattatttttaaaaaaatttaatggttttttttataaattatttttggtagtatgcgtttttatatatatatataaaatgtatgggaaatttttaaaggatatattaaattaaagtaaaatatataaataaaaaattagaatataaaaagataaaaagattgggaagggagggagggagtaaggaggaagggtgggtgggtatagagaaatatattaaataatggtaagaagtggggttttgatattttttatattttttttaaataaaaaaaattttttttttttttttttttttttttagagacgaagtttcgttatgttgtttaggttggttttgaatttttgggattaagagatttttttgttttagttttttaaggtgtttggattataggtgtgagttattacgtttggttattttttatattttaatatatatatttttttatttttaatgttatttttattagttaatttataatatttatttattattatatttaaagtttatttgaagaaataaattagaaagaatgaaatattttagtttatatgttatttaatattaaattattttttaaattatatttaagaagttgatgatttaagttttggcggtttttaataaatattggttaaattataattaaattttaatatattagttagtatttattgagtatttttttttataatttaagtattgtattaggtgtttaaatataagtagtttgatttttaatatatttaaaaatatatatttaagatttaaaattttatttatggaatttagttatattttgaggtttttagtgttgagaaatttgaggtttgtgttgttttttagtttttaaagtttagttttgagtttttagattttggtggaattttatgtattgttaggttggttcgtaatatttgtgggataattttagtttttgtgtatatggttaggaggttggttgtaaatatttttaggtaggtggattaggatatgtttttggttatggttaggtggaggtatagtgttatatagtaggtagaagttaatattgatttgtttttaaagaaatatgtattatttttataagtagaaaaaatttttatttttgggggaaaagattatgttagattttttaggattaaatgttgatgtatttgttaaatttttatatattagaatatatttattatagaaagaatgaaaatgggatatttgtgtgttatttatgtgaatattttaaaaatattttataataattaagtattttataaattttatgaattgaaatttagtttaagttttaggaaaatataaattttgttagatattataaaaatgatataatatatatttattttaggtttattagaatatatttgttattatttgataagaatgaaaatgtattattttgtagtgttttaaaattaggaagatttagagtattaaaaatgattttttttttgaagtttatttattaatttttttttagttatttattgtttttgttataagtataaattaggatttagttagaattttttgaaatatatatttgtaacgattattgtatttattaaaatggtttagtgtttggttataggttttgtagatcgattaagaatttgaaaagttttgtttattttaaaggaagtttatgtgaattttgtttagagtttattttagatatgtagtttaagaatatagatagattagtagagatgtattttaaaataggaattttggtaatataataaattgatttttaattaaaatagatttatatattatatttatgttaagaagttgttttgttttattgtattttagattttatttttttgatttatggtttattttaagtataaaaaatttgttaatataattttttttaaaaggtataaataaaaatttataaaatttgtattatttgagatattttaggtatgaatttataattttgttataatttattatatatatgtatatatatatatatatttgggtatattgggggggttttaatttaagaaatgtataattggttatagatagatagttgttagaatttggtaatgggtacgtgtaggtttattatattaagtttatttgtagttgtttaaaatgtattataatataaggtcgggcgaggtggtttacgtttgtaattttagtattttgggaggttaaggtaggaggattgtttgaggttaggagtttgtgattagtttgggtaatagagtaagattttgtttttaaaaagaaaaaaaataattttttataaaataaaaataaaatgtattattagacgaaattaaataagaggtaatttatttaaatgataattttttttagtttgatatttaataaaaagtttaagtttttttaatttatatttaatgattaaatattaaatattaattttttttttttttttttttttgagacggagtttcgttttgtcgtttaggttggagtgtagtggcgcgattttggtttattgtaagtttcgtttttcgggtttacgttatttttttgttttagtttttcgagtagttgggattatagatatgcgttattacgttcggttaattttgtatttttagtagagatggggtttttttatgttggttaggttggttttgaattttttattttaggtgatttgtttgttttagttttataaagtagtagttgggattataggtatttattattatatttggttaatttttttgtattttttttgtaaagacgggattttattatgttagttaggatggtttcgattttttgattttatgattcgttcgttttagttttttaaagtgttgggattataggcgtgagttatttcgttcggttattaaatattaatttttaaatggtaaggatttattatttagaatttgtatttttattattaatatgtaaatatttattgaatatttattatgttatgtatattagagagagttagataaatttgatatagttatttttatagaatttatagtgtaatagatggtatgatatgtatatgagtaattgtgaatagtgttaaattgttatttaaaaaaaaagacggttgggcgttgtggtttatgtttgtaattttagtattttgggaggttaaggtaagttgatcgttcgaggttaagagttcgagattagtttggttaacgtggtaaaatttcgtttttattaaaaatataaaaaaaaaattagttaggtatggtggtataggtttgtaattttagttattagggaggttgagatatggagaattgtttgaatttaggaggtagaggttatagtgagtcgagattatattattatattttagtttgagtgatagagcgagatttcgtttaaaaaaaaaaaaaaaaaaaaagatataggttaagtgttatggtagttgaagagagaatttaaattttgttttagaagttttatttgtatgtggattattgatatgaaataatataaataggtataatttaataaataggaattttagttttaattattttaaatattaaaattttttattaaataggtttaataaatttaatttttataagagttagatagaaatttatttggtggtttataattttattagtttttatttgttttatttgatattaattaattttatttaatatggattagttaataatttagtggttgttttgataggaatagttggagagagttggggattgtaatatatttaattatataaaaatgtatttagtatttattttgattaaggtagtgtgtaatagaatttgtaggagagtaaaagaatgattataaatttataatttttaaagagtttatagttgggcgtggtggtttatgtttgtaaattttagtattttgggaggttgaggcgggtggattatttgaggttagaagtttaagattagtttagttaatatggcgaaattttgtttttataaaaaatataaaaattagtcgggtgtggtggtacgtgtttgtagttttagttatttgggaggtcgaggtaggagaatcgtttgaatttaggaggtggaggttgtagtgagtcgagattgtgttattgtattttattttagtttgggcgataagagtaagatttcgttataaaaaaaaaaaaaaaaaaaaagtttaaaatttagtgggaaaggtatatatatatataattaattgtatagtataataaagtttataatttgtaataaaatttaattcgataagtttagaaatttgtgatttattaaaaatagttatatatatataaaaagtaaatttagaatttaaagttatttagtattaatgattttttttttaagtagtattaagtttaaagtagtgattatattttattgtttagattgtaaattgagtaaaggagattagtatttttttgttattgaattagtatagtcgtgtaaattaataaggtaatggtagtgtttaattttttgtatgaatataagttatatttgttttattatttgtgatttggtgttgtatgtggttattattaatattttttgaaagaataattatttgtttaggttgttataataaaatattatagattgagtgatttaatagaaatttattttttatagttttggaggttgggaagtttaaaattaaggtatttgtaaggtaggttttaattttaggttttttttttggtttgaaggttttttaattgtgtgtttatatgattttttttaataagttttttggtgttttttttttttttttttttttttttgagatagagttttattttgttatttaggttggagtatagtggtataatttgggtttattgtaatttttaattttcgggtttaagtgatttttatgttttattttttcgagtagtttggatgataggagttcgttattatatttagttaatttttgtatttttagtagagatggtgttttattatattggttaggttggttttaaatttttgatttcgtgatttatttattttggttttttaaagtgttgggattataggtgtgagttattgcgttcgttttggtgtttttttatataagggtattaatttaattagatttgggtttaattttttcgattttttttaattgtaattattttttaaaggttttgtttttaaatattattatattgggggttaggattttaaaaaaggtatggggggggtgtgggaggatataaatgtttagtttataataagtatttaatataaaaatggttagaatagattataaaaaaaaggttttgtatggttttggggaagggtttaattttaaaatatttgagagttttggaggggtttagaagtggtaaatgaatgaaaacgtggttattttttagatttgttttttttaaatatggttatttttggttgaattagaaattaaaggataggttattaattattagttttaagttatttattatttgttgagatagtttagaaatttgattgtatttttttagagatttagaatatagtttttaaattttaatttatttgtgatatatttgtgaatgataaaaatcgttataggtatttttattaatttgaaagagtattgagaaattattttttattttgatttttgtttggaatgaaaattaatatttttgttataatcgattattgaaataattttattttttagtaaaattggtattataattttttttaatttttaaaattttataattttttgttagattgatttatgtaaatatataaattattaataattatgtacgttatatttgtaataatggtttttatgtaaatatttttgtggtttatatataaaatttttaattataaagttatattatttaaaattatagtaagtaagaaaattaatttaagttaagataatatttgtaatattaatttattatttgtgataaggattgtttaagtttttttgtggttaaaaaggaaaaaaaaaaaaaagatatgttggttagatgcggtggtttatatttgtaattttagtattttgggaggttgaggtgggcggattatttttggtttgtttaatatggtgaaatttcgtttttattaaaaatataaaaattagttgggcgtggtggcgggcgtttgtaattttagttattcgggaggttgaggtaggagaattgttagaatttaggaggtagagattgtagtgagttgagattgtattattgtattatagtttgggtaataaaagtgaaattttattttaaaaaaaaaaagataatgttcgtgggtttaaataagatttaatggaagtgagtttaaaaatgagttatgtgggttaggcgtagtggtttttatttgtaattttagtattttgggaggtcgaagtaggtagattatgaggttaggagatggagattattttggttaatacggtgaaattttgtttttataaaaattagttgggcgtggtggtgtttgtttgtaattttagttatttagaaggtttaggtaggagaatcgtttgaattagggagtcggtggttagagtgagtcgagattgtattattgtatttttgtttggtgatagagtaagattttattttaaaaaaaataaataaaaataaaagataaaaatgagttatgtgaattaaaagaggtataataatagataaattatattttatttaatttttagtaatgagtaatatttttaaatttttggaatgggtagaaattgttagttggtatatttttattttttatatttagatatattaaaatttttaaaaaaaaatattttaaagtagatgattcgttatttttttggataatttgtgttaatttaggataatagaaaattaaaattatgagttattgatgtaatatttttaaatgtaaaaataattaaagttaatagtagatttattttttaattttatattagttttataaataaattatatatataatttgtttgtttttttttttgagggataaagttgttagaagaattaaaattagtatttttgattatttaattaagggagggataaattattatttattttagggatatgggtttataattattatatgtgtaaggatatgaatttatttaatattataatttttttttttattagtgtgtatagtggaagaatagatatgtttattttggataaaaaaaaaattatatttattagttattagaagtataatgttgaagatagtagttttataataatttgaagtatgtgatcgaattagtagattattttagtagtagtgaattattgtaaatgttagtaatttggtagttattgggtagaaaaataagaattgaggtttaatattgatattaatggtggtgattgatatataaattttattaagtttatataatataaaattatagaaaggtagaagagtatattagtataattttaatatatttttattataagggagtaaaatgatatggtttagttattatttaatgaattgtagaaaattaaaagaaaattttaaggtaatttttttttgttgatttggttggttttttttttattttttgtaatatttagatataaataatggatagaaaataaagtagatttgtagtatgtaggttatagtgttaaatttatagaaagaaatttttgaattgaattgttttattttttggtggttataaagagtaattttggtttatatttatagattgatgttaatttatattttgttgataatagtgtggttaaggataaaaaaaaggtgtttcgttttattaattttgtaaaaaattattggtagggtaagttcggttagggtaggattatatttttaggattattattttcgaaatttagaagatattatatttatataaagtatattttttatattaatttgtaaaaatttaaaagtttttttttagtttaagtgtgtttaagtttattttggtagtttaaaacgatagttataagtagtatgggttgtattagatatatttgagggttaattttatgtaagtgatattgggtaagttattttaattatttgtgtttttaaggttatattagtgtttatttatttaaagggtatttgttatgtaattttagggtgtttatattagataatgtttgtaaaatatttattttaacgtttaaaatatagttaagtatttaataaatatttattattgttattattaatttaaaagtttagagattaagagtagaatttggggtgagataaatttaggtttaaattttagtattgttgggtaattttgggtaagttatttaatttttttgatttgtgtaatttaaaaaattagttaatatatataatagggtttagaagagtatttagtatatagtattatttaagtatttgttattgttaatatgtaaataatttaagggaaagaaattttttaaaaaggaagagggatttgtaaattaaaaataatgagtattttatgtttaaagaaaattaataaatagttagttttagtaataattaaatttattatatattggggtaggtattatattttaaagttaaaagcgtttatttaggttaggtacggtggtttatgtttgtaattttagtattttgggaagtagaggcgggtagatcgtttgagtttaggagtttaagattagtttggataatatggtaaaatattatttttataaaaaatataaatattaggtcgggcgtagtggtttacgtttgtaattttagtattttgggaggttaaggcgggtggattatttgagattaggagttcgagagtagtttggttaatatggtgaaatttcgtttttattaaaaatataaaaaattagttaggtatggtggtaggcgtttgtaattttagttatttagggggatgaggtaggagaatcgtttgaattcgggaggtagaggttgtattgagtcgagattatgttattgtattttagttcgggtaataagagcgaaattttattttaaaaaataaataaataaataaataaaataaagtataaatattagttagggatggtggtgcgtatttgtagttttagttatttgggaggttgaagtgggagaattttttgagtttggggagaattattcgagttcgggaagtcgaggttgtagtgagtagtgattgtgttattgtattttattttaggtgatagagtgagattttgttttaaaaaaaagaaattggtagaattaagtaagttgatgtttagagatgaaaaattaatattttttttttagtaattgaataaaaataatagttattattatttttttgagtatttatttgtagtttattttttaattggtattattcgagagagagagagttaggttcgagatagagtttttttttttaataattgtatgatttagggtatgtttgttagtttttttgaggttttaaaggttttttatttgtaaaatggtaataattatattattgttatagggttgttttgaagattaattaggattatgtaagtaaatatgatgatggttattattattgtttttcgttaggggttatgtaagggttgttgatttatatagattgttttataatttttttaataattttaagaggtagttagtattttagatatatataaaatgatttaagtttagagaggtgaagtaagttgtttatagttatataattagtaaatagtttaaataagttggatttttagttagatttcgttaatagtattgttttttattttaagttattataatgtttaatatgaaatagaatcgttttttttttagggtttaagtggttaattatttaatgtatttatttaataaattattatcgaggattttttataagttaagtattgtgttaagtgttagagttacggcggtgatttttgtttttaaaaagttttagtgggagaaataataggtaattaggttattgttaaaataataaaaataattataataaagtaggttaaagtatatttaattggtcggggttttgattattttagtaagtatgattagaacggttgaggagggaggttagtagtttggtcggtttaataaataagaaaaaattagtgagggtggagttaagatattagaggttgattacggttaagaatgtttttgaaggtaaggattagatttttattttttatattttggggtatcggttagtatggaatttggattttagtatatgtgaatttcggtttgaaatgatttaatgttttttttttagttttttcgtgtgttaaatacgtatggttatcgttattagagttgtagtggggttttaatgaggttatgagtatttttataaagatgaattatagtgtgtgtaaaattaaaggtaaaatttggtttttatacgtttttttaggtggtcgtttttcgtgtcgaggtttttttagaggtgtttcgagaattttattatcgtattttaaatttttagggaagggtttttttcgagaaagtttttacgtttttatttcgcgttattattttcgaatttgttttcggttttttttcgtagtacgttcgtaggcggtatatgttaattaaaacgttatttttattttttttttttatacgtagttttttttttttagggttttttcgaggagggatttattttaaatttcgttatttcgttttttttgtcgttttcgcgtgacgtaaagtcgaattcgggaaattggtcgttttcgtttgcggggttttttgggttcggtcgttcgagttcgtattgcggatttcgcgttttagggttcggtcgttatttgtcgcgtgggtttgaatcggttagggtcggtaggtcgagttgtttattacgacgttagggttgcgggtcgttataacggagtcggtcggcgcgcgggttgattgtttaggaggaggaagtcggtggcggagtagaggaggaggcggaggcgtagtaagaggcggcgtcgcgcgggaaagtcgagaggttcgtttgagggttcgtcgtagtcgtttgaagttgaggagaagtaggtttcgttttttgttcgtttcgttacgtttcgtaggtttcgttttcggtttcgttcgcgcgtttacgtcggcgtttattagtttgtaggtttattaggtagtcgtgggaatttttttttagaagaagtcgaggtttttttagcgaagttttttttttttttaatttagttttttatttagagggttttttgatttttaaatttatcggcgcgcgttgttttatggcggtcgtaaatcgggtttcggtttttcgggttttagttatcgcgtgaatttttggattagacgttttatttttaagattttgtattatttgtggtttttatttttttgatttttggtttagtgtttttttaaatttttaattggttgtaatagttgagatttagagttttagagttatttagattagggtatatatttgagaggatatttaattgttttgtagttttgtataaattagattttgagtttttatttttgttttattaaaatgagtatattagttcggcgcggtggtttatgtttgtaattttagtattttgggaggtcgaggtaggtggattatttaaggttaggagtacgagattagtttggttaatatggcgaaattttatttttattaaaaatataaaaattagttgggcgtggaggcgggcgtttgtaattttagttagttcggaggttgaggtaggagaattatttgaattcgggaggcggaggtcgtattgagttgagatcgtattattgtattttagttttcgcgatagaatgagatttcgttttaaaaataaataaaaataaaaataaataaaaatttaaaaataaaatgagtatattaataatatataaataggattattttgagtattagaggagtataggtatgcgtgtgtgtatgtatatatatatgtatttaggatagtatagttagtaaatgggaattattgttattattattgatttttatttttgtttatataagtttttatattgaatttgaaaataaaaatatgtttttttgttaattaatttttagataggttaggtaagtaagtaatagttgttttagtaatattattttttatatatttaattttatagttttagtatttattatagtgtttagtatatagttggtggttttttttttattaaggacgttgaggggtatgtgatggtaggagatttgtaaaattaggtaagttattgagtttttttggattttagtttttttatttaaaaaatgagaataataaatttgggtaatatggtgagatttagtttttataaaaatgaaaaattatttgggtttggtggttatgtgtttgtagttttagttatttgggaggttgaggtgggaggatggtttgagtttaggaggtttaggttgtagtgagttaagattgtgttattgtattttagtttgggtaatagagaaatattttgttttaagaaaaaagaaaaagagagagagagagaataataattattgttatgaagagttttacgagaattttaaaaattatttatgtaaagtattttatatagtatttgttatataataggtgtttaagaaatagtagttgttataattttagtatgtatgaatttgtgaagtttatatttttttattttttttgttttttttttttattttggagaggtagtaggttgtaatggaaaagggatgtatgggttttggattgagtttaaattttgggttttttattattatagtattttgattttgggtaagatttttggtttttgcgtgtttggttttttatacgttaaatgaggttaatatttttgttatagagtgtggtgaagattaaataaaataatatatgtaaaagtgtttagtatagagtttggtttaatatatgatgatattaatgttacgtgttttataataattttgttttaaatagtttatttttttttagtttttaagatttttttttttttttttgagatagagtttcgttttgttgttttgttggagtgtagttgaatgattttagtttattgtaatttttgtttttcgggtttaagtaatttttttgttttagtttttcgagtagttgggattataggcgtgtgatattagatttggttaatgtttgtatttttagtagaaaatggggttttattatgttggttaggttggttttgaatttttgattttaggtgattcgtttattttggttttttaaagtggtgagattatagatgtgagttattacgtttagtttgtttttaagattttttatttatttttttgttgatggatatttgggtagtttttaggtttgggttattagaaataatgttattatgaatattttgtatatattttttggtgaatatatgaatgtatttttatttggtatagaatttgaaatttatattagaatatttttattatttatttttttaataaatattgtgttttattaggaagttaatttagagaattttcggttatatattcgttttttgatatatgtggttttagttatttaaatttgtttttaaattaggtatttaataatttagaatttttttagtttgtttttggtttgtagtttttttttttaaattttgtagtattagatatttttgtattttaatagtggatttgaaataaataatgatagttagatgattgtaaaaataaagaaatagtattgtttttttaattttgttattttgtgtgataatttggattttttatttgtatttaaaatggaaaatagtaaatattgtaatttgtaagatgtaagatttttttttggtaagtgaaaatttggtttatatatgaaatggtttattgaatttttatattatatttaaagtggaaatgtatttttttaaaatattgtttttttattatagataaaagtaagaaaataattatttttaattattatatgattattattgaaaatgattttgttatagaggtgaaaaatgttaaaaaattatttattttggacgttttatatgttaggtatgttattgttttttattggaatatttgtatgtaggaagaaataaggaaagtatgagtgtaatttaagattttttttttcgatgtttttttagaaataatttttttttttttgagatggagttttgttttgttatttaggttggagtttagcggtgtgattttagtttattgtaatttttgttttttaggtttaagtaattttttttttttagtttttcgaatagttgggattatagttgtacgttattatattcggttaatttttgtatttttaatagagatagggttttattatattgattaggttggtttcgaatttttgattttaggtgattcgtttgtttcggttttttaaagtggtgggattataggtatgaattattgtatttagttagaaataattttgtaatcgatttgtttgaatataattatgaattatttgtgcgttataattaagtttaattgtattttttttttagaaatttttttattaagaagtttgtttttaattatggtgttgtgtttcgttaaaatttgtatttttatgaaaaataattattataaaaatatttatattaaatgtttatttttttaatgagttgataatggtttttttaataatgttagatgttttatttttattagaataattttttataagttttattttttttttttttttttttttgatacggagtttcgttttgttatttaggttggagtgtagtggcgcgatttcggtttattgtaagttttgtttttcgggtttacgttatttttttattttagtttttcgagtagttgggattataggtatttgttattacgtttggttaattttttttgtattttttagtagagacggggttttatcgtgttagttagaatggtttcgattttttgattttaggtgatttgttcgtttcggttttttaaaatgttgggattatagatatgagttatcgtgttcggtttttataaattttatttttattttataaatggggtgtaaaattgaattataattggaattaattaatatgatggttaatttttttttttttttttttttttgagataaagttttgttttgtgatttaggttggagtgtaatggcgcgatttgggtttattgtaatttttatttttcgggtttaagtaatttttttgttttagttttttgagtagttggaattataggtgtgtgttattacgtcgggttaatttttgtatttttagtagagatggggttttattatgttggttaggtcggtttgaaatttttgatttcgtgatttgtttgttttagttttttaaagcgttgggattataggcgtgagttatcgtgtttggttatgatggttagttttatgtgttaatttggtttatatatttggttaaatatttttttggatgtttttgtgaaggtgttttttgtatgagattaatatttaaatcggtgggttttgagaaagtatattattttttataatgtgagtgggttttattagttaaaggttttaatagaataaatattgattttttttgattaagaaggtattttttagtatattgtttttggattggaattgtaatttttttttgagtttttagatcgtaggtttatatttttagattttggatttaataagtttttataattgcgtgagttaattttttaaaataaatgaattttttttaatttcgtatatagatatatagatagatcgagatagatttaggtatattttgttgtttttgtttttgtggagaatttcgattaatataattgattttttattggaattatttaaagatattaatattaaattggtattatttaattgtgaagttttgttaatagagttacgtattataagtagtgttttattttttattatgtataag

SEQ ID NO: 101 - DNA, 5769 bp, Artificial Sequence
  chemically treated genomic DNA (Homo sapiens)
ttgggtgtttgggttgtgtggaggggtgtttttttttgttagagtattttttatattgttttttagttgtttgttcgttttttagttttttggattttaaggttcgtgatagtaaaaataatgaatattttgtttattattatatttttagtatttagttggtatatgagaggtgtttaataaatatttgttgaatggttatataatagaaattatgtattatatttagttgggggttaaaagtatagaagttagatatagtttatttagtttataataattattatttgcgtttattaagagtttattatgtattaagaattttatatgtgttattttgttaattataaaataattttatagatagtattagttttatttgaaagatgaggaaattgtggtttagagagagtttatgatttgggtaattatatagtaagtttagatttggattaaggtttatttaattgtagaatttagttttagtttgttttgatatatgatgggtttttaaaaagtttatggaaaatgtatattatgaaaaaaattatgtttggattttaatttttttgtaataaaatatatttatattaattttttataatatgtttgaataggatttagtttgaggtattgtaaaggataagatattagattgaaaagagttttatcggtcgggtacggtggtttatgtttgtaattttagtattttgggaggtcgaggtgggtagtttacgaggttaagagatcgagattattttggttaatacggtgaaatttcgtttttattaaatatataaaaaattagtcgggcgtggtggcgggtgtttgtagttttagttatttaggaggttgaggtaggaggatggtatgaattttggaggcggagtttgtagtgagttaagattgtattattgtattttagtttgggtgatagagttagattttgttttaaaaaaaaaaaaaaaaaaaaaaagagtttttattaaagtaaaggaattttgttaatattgaagtaagaataaatattaaatatatgatgaagtttaggtggaagaatgatgaaatttttgatgttttatatatagtttatggggataatgttttagcgaaattagtagtttataaatggataatttgttttaagaagggttaagatgttgaagatgaaatttaaagtagtagattatttatattaatttgtaatgaaaaaattaattttgtttgtgttataattgaagaggttgatgattaatagtaaaaataatagttaatattatagatattttaattgatttagtttatataattttgattgaaaaaaattaaaattgggtaaattttttatttaatgggtgttaaaatttttttttaatggtaggtaagggatgtggaaaatttattttttttttatttaagttgaagtttgttgagtaggtaaaggtagatggatagtattttttatttatttggttttagtttgggaggtttgtgtttaaagtagttatagataagagtagagtttttaatggaaattttaaaaatatgcgattaagatgttgaagtatttttttgaagatttgtaataagagatgaaatatagtttttttattataattttgaagataaagtataattaaagtaatggttattaagaggtgtaagtgggtttagttggattggttaagagtaaaggttgtggtaatagttaattgagatgtataaggtattttttttgttgattttttgaagggttaaagaatgataatatttgtttattttgagagtgttttgagaaagttaggtaaatttttagtagaaaaatgtttcggggaaagttttaatagagagggtttttttttattatagtgtttttgtttattttttttattaaataagggtaattttttaagagtgttaatgggaaattattaggtatttattttatagttttaatttggttttttttgatttggttttgttttttaattttaataaaaatcgtggttgggtgtagtggtttacgtttttaattttagtattttgggaggttgaggcgggtggattgtttgaggttaggagttttcgattagtttggttaatatggtaaaattttgtttttattgaaagtataaaattagttgggtatggtggtttatatttgtaattttagttatttagaaggttgaggtacgaaaattttttgaattcgggaggtaggggttgtagtgagttaaaatcgtattattgtattttagtttgggtgatagagtgagattttgttttaaaaaaaaaaaaaaaaaaaaaagattgtattgatatgtttaaattttaaagattttaagttttttagagatggattaaatggttggtattatggtttataaatgtgttttgaatttgatggaatttatgttgaaaaatataggttaggcgtagtggtttatatttgtaattttagtattttgggaggttaaggcgggcggatttcgaggttagaagatttagatcgttttggttaacgcggtgaaatttcgtttttattaaaaatataaaaaaaaattagtcgggcgtggtggcgggtgtttgtagttttagttatttgggaagttgaggtaggagaatggcgtgaatttgggaggtggagtttgtagtgagtagagatcgcgttattgtattttagtttgggtgatagagtaagattttattttaaaaaaaaaaaaaagaaaaatatagtttattttttttttttattttttaattttatttttttatgaattttgtttatttgtttgagatagttttgttttgtggtttttttttttttagtatattgtttttatgtgataatattgtttattgtgttataatgtatttaattatgttatagttattttttatgttatttttattgttttggtaattttatttggatttgggtttttttcgtagtttaatatgtttatagatagttttttaaattttaggttatagttagttttaagttttatttgttgagtaattgattggttttgattagttttttttttagagtttttataaatatatatgggtattttatttgtttatttttaaatagaaatttttggttttagggtagtattttttaaatggtgagtttataatttattgggttttttattaaaaaagggatagaatataaagtattagaggatattgaatataattaatgaattaattttagtttttttgttgttgttgagatagttttattttgttatttaggttagagtgtagtggttcgatttcgttttagtgtaaatttcggtttttcgggtttaagttatttttatgttttagttttttgagtagttgggattataggcgtgtattaatatagttggtaatttttttttttttttggagatagagttttattttgttattaggttggagtgtagtgtgcgatttcggtttattgtaattttcgtttttcgggtttaagcgatttttttgttttagttttttaagtcgttgggattataggcgtatattattatgtttagttaatttttgtgtttttagtagagataaggttttattatgttggttaggatggttttagttttttgatttcgtgattcgttagttttagttttttaaagtgttgggattataggtgtgagttatcgtgtttagtttaattttgtattttttagtagatatggagtttcgttatgttggttaggttggtttggaatttttgattttaggtgatttgatcgttttagtttttcgaagtgttgagattataggtataagttattgcgtttaatttaaattttaaaaaatttaaataaaaaaagaattttgattttggggagtgggtgtgtatgtgtataggaagaggtacgatgaaggataaagtttaagattttattgttgtataaatttagttttttttgtgaaatcgttgttgaaagtttgatttttaatatattttagtattttttaattacgtagtgtttattatttgtttttttagatttgttagataaaagtttagatgcgtcgggcgcggtggtttacgtttgtaattttagtattttgggaggtcgaggcgggcggattataaggttagaagatcgagattattttggttaatacggtgaaatttcgtttgtattaaaaatataaaaaattagttgggcgtggtggcgggcgtttgtagttttagttattttggaggttgcgttaggagaatggcgtgaattcgggaggcggagtttgtagtgagtcgagatcgcgttattgtattttagtttgggcgatagagcgagatttcgttttaaataaaataaaaaataaataatataatataaaataaaataaaataaaatttttagatttttttcgatttaaagatggggttattttagggtaaatttatttgtaaggttgaaaaattttaagttaattattgtaagtcgaggattatttgtatatggtatgagaattattagttgtttatttttatttattttgttttttgaaataaattgtttgagggtaaggatttttatatttttttgttatttttgttaggtgtttaattatcgtttataatgataatagtaggaaaaagtgcgttttttagtaagtggataaataagtttgagtatattgttttgttttatttttttgttacggggtaatataataaggtaaagtatttttataacgaggtaagattaggttttgttttttaaggagttcgtagttttgtttgttttgttcgttttttggtagattataggttgtggagattttttttttcgttttttaacgtggagtcggttgagtacgattttttcgttttagcgcgggaggtttgcggtttgcgggtatgaggcgttttaggggatttggtatcgtcggcgtgtaagagaggagcggatttgagacgtaaggagaagttttgtttttggagtttagtttttttttttttttggtttttttcggaaggggttaggagatattggaaggttcggacggtagggaaggggacggggttttttttagttttattcgtgtagggatattttttttttttatttttcgatgtattttcgttgaatttgggatgggagagacgaatcgagtttaggtatttgcgtagtagcgtcggggagagcggggagtttagggcggagtttagtcgattttcggatttttttgtttcgttttcggtacgaggtttcgtttcggcggtttcgttttttttcgggattcgatcgggttgcgtttattgtttagtcggggtttcgggagtttttaggttttcgttcgttttgagttgcggttttcgtatggaggggttatttattttattatcgttgtagggaggcggagtcgtcgttgtttcggagttcggagttcggtaatattcgggatacgagacggcggcgtagcggtatagcgttcgattgttgtaggtcggttacgagttcgagaggtgacgtttagggtagagcgcgcggggcgtattcggggcgggcggtcgaggagggcgcggcggtttcgggaattcggcgacgttgcgggggaggggtaggttttataaattttttttttattatcgttttagtttttaatttttcgaaacgttacgttttcggttttggttgggggatgtagacgggtattgtgcgaagggttaggtgtttcgttgtacgggggagcggaggagagggaataggtcgtaaaaattttttttaaaattttagt

SEQ ID NO: 102 - DNA, 5769 bp, Artificial Sequence
  chemically treated genomic DNA (Homo sapiens)
gttaagattttagggaaggtttttacgatttgttttttttttttcgttttttcgtgtaacgaagtatttaatttttcgtatagtgttcgtttgtattttttaattaaagtcgggagcgtggcgtttcgggaagttagaggttgaggcggtaataggggaagggtttgtggggtttgtttttttttcgtagcgtcgtcgggttttcggagtcgtcgcgtttttttcggtcgttcgtttcggatgcgtttcgcgcgttttgttttgggcgttatttttcgggttcgtagtcggtttgtagtagtcgggcgttgtatcgttgcgtcgtcgtttcgtgtttcgggtgttgtcgggtttcgggtttcggaatagcggcggtttcgtttttttgtagcggtggtggagtgagtggtttttttatgcggaggtcgtagtttagggcgggcgggagtttggaggttttcggggtttcggttgggtagtgagcgtagttcggtcgagtttcgaggaggggcggggtcgtcggggcggggtttcgtgtcgggggcggggtaggggaattcgggagtcgattgggtttcgttttgggtttttcgtttttttcggcgttgttacgtagatgtttagattcggttcgttttttttattttagatttagcgagggtatatcgggggatgagggggagaggtgtttttatacgggtgggattggaaagaatttcgtttttttttttgtcgttcggattttttagtgttttttggtttttttcgaggaaaattagaagaggaaaggagttggattttagaggtagggtttttttttgcgttttaggttcgttttttttttgtacgtcgacgatgttaggttttttggagcgttttatattcgtagatcgtagatttttcgcgttggggcgagagagtcgtgtttagtcgattttacgttagagagcggggagagggatttttatagtttgtaatttgttagggaacgaatagaatagataaggttgcgggttttttaaggaataggatttagttttgtttcgttgtggaggtattttattttgttatgttatttcgtaataagggagtggggtagagtagtgtatttaaatttgtttgtttatttattagaaggcgtatttttttttattgttattattgtgaacggtgattgaatatttagtaaaaatggtaaagaaatgtaagagtttttgtttttaggtaatttattttaggagataaagtagatgaaaataaatagttgataatttttatgttatatatagatggttttcgatttataatggttgatttaagattttttaattttatagatggatttattttgaggtagttttatttttaagtcgagaagaatttggaaattttattttattttattttatgttatgttatttattttttattttatttgagacggagtttcgttttgtcgtttaggttggagtgtagtggcgcgatttcggtttattgtaagtttcgtttttcgggtttacgttatttttttggcgtagtttttagagtagttgggattataggcgttcgttattacgtttagttaattttttgtatttttagtatagacggggttttatcgtgttagttaggatggtttcgattttttgattttgtgattcgttcgtttcggttttttaaaatgttgggattataggcgtgagttatcgcgttcggcgtatttggatttttgtttgataagtttgagggaataaatggtaaatattgcgtgattgaggagtgttaagatgtattaggggttagatttttagtaacgattttataaaggaagttgaatttatgtaatagtaagattttggattttattttttatcgtgtttttttttatgtatatatatatttattttttagaattaggattttttttttatttaagttttttaaaatttaggttgggcgtagtggtttatgtttgtaattttaatatttcgggaggttgaggcggttagattatttgaggttaggagttttagattagtttggttaatatggcgaaattttatgtttattaaaaaatataaaattaggttgggtacggtggtttatatttgtaattttagtattttgggaggttgaggttgacggattacgaggttaagagattgagattattttggttaatatggtgaaattttgtttttattaaaaatataaaaattagttgggtatggtggtgtgcgtttgtagttttagcgatttgggaggttgaggtaggagaatcgtttgaattcggggggcggagattgtagtgagtcgagatcgtatattgtattttagtttggtgatagagtgagattttgtttttaaaaaaaaaaaaaaattgttagttatgttggtgtacgtttgtagttttagttatttaggaggttgaggtatgagaatagtttgaattcgggaggtcgaggtttgtattgaagcgagatcgggttattgtattttagtttggatgatagagtgagattgttttaataataataaaaaagttaaaattaatttattgattatatttagtgttttttggtattttgtattttgttttttttttggtgaggggtttaatagattgtggatttattatttaaaaaatattattttaaagttaaaggtttttgtttggaaataagtagataaggtatttatatgtgtttataaagattttgaaggagaaattagttaaaattaattaattatttaatagatgaaatttagaattagttatagtttaaaatttaaaggattgtttgtaaatatgttaaattgcggagaaaatttaaatttaaataaagttattaggatagtaagaatgatatgaaagataattgtaatataattaaatgtattataatatagtgaataatgttgttatatgaaggtaatgtattgaaaaaaaaagggttatagagtaagattgttttaaataaataaataaaatttatggaaaaatggaattaaaagataagaagaaaaaataaattgtattttttttttttttttttttgagatggagttttgttttgttatttaggttggagtgtagtggcgcgatttttgtttattgtaagttttattttttaggtttacgttatttttttattttaattttttaagtagttgggattataggtattcgttattacgttcggttaatttttttttgtatttttagtagagacggggttttatcgcgttagttaggacggtttggattttttgatttcgggattcgttcgttttggttttttaaagtgttaggattataggtgtgagttattgcgtttggtttgtattttttaatataagttttattaaatttaagatatatttgtaagttatgatattagttatttagtttatttttaaagaatttaaagtttttggaatttaagtatgttaatgtagttttttttttttttttttttttttgagatagagttttattttgttatttaggttggagtgtaatggtgcgattttggtttattgtaatttttgtttttcgggtttaagagattttcgtgttttagttttttgagtagttgggattataggtgtgagttattatgtttagttagttttgtatttttagtagagatagggttttgttatgttggttaggttagtcgagaatttttgattttaggtaatttattcgttttagttttttaaagtgttaggattaaaggcgtgagttattgtatttagttacgatttttgttgagattaggaaataaaattaagttagaaggagttaaattaggattgtaaggtggatgtttaatgattttttattaatatttttgaaaaattgtttttgtttgatgagaggagtgagtaagagtattgtgatggagaagagttttttttgttgaagtttttttcggggtatttttttgttaaaggtttgtttaatttttttaaaatatttttaaaataagtagatgttattattttttggttttttagaaagttagtaagaaaaatgttttgtgtattttaattaattgttgttataatttttgtttttgattagtttaattggatttatttatattttttagtagttattgttttgattgtgttttgtttttaggattgtaatgggaaagttatgttttattttttattataagtttttaaagaaatgttttagtattttgatcgtatgtttttaaaatttttattgaaagttttgtttttatttgtggttgttttgggtatagattttttaagttagggttagataggtggaagatattatttatttgtttttgtttatttaatagattttaatttagatgggagaaaaatagattttttatattttttatttgttattgaggaagagttttggtatttattgagtggaaagtttgtttaattttaattttttttagttagaattgtgtaaattgaattaattgagatgtttatgatgttggttattgtttttgttattaattattagtttttttagttgtggtataaataagattaatttttttattgtaagttgatgtagatggtttgttgttttgggttttatttttaatattttaattttttttaaaataagttatttatttgtaaattgttgatttcgttggagtattgtttttataaattgtgtataaagtattaggaattttattatttttttatttaaattttattatatatttaatgtttgtttttgttttaatattagtagaatttttttgttttgataggagttttttttttttttttttttttttttgagatagagtttagttttgttatttaggttggagtgtagtggtgtaattttggtttattgtaagtttcgtttttaaggtttatgttatttttttgttttagttttttgagtagttgggattataggtattcgttattacgttcggttaattttttgtatatttagtagagacggggttttatcgtgttagttaggatggtttcgattttttgatttcgtgagttgtttatttcggttttttaaagtgttgggattatagatatgagttatcgtgttcggtcgatagagttttttttaatttgatgttttattttttgtagtgttttaaattagattttgtttagatatgttataaaaagttagtatgaatgtattttgttgtaaaaaaattgaagtttaggtatagttttttttataatatatattttttatgaattttttgaagatttattatatattaaagtagattagggttagattttgtaattaggtgggttttggtttaaatttgggtttattatataattatttaagttatgaattttttttgagttatagtttttttattttttaaatggagttaatattgtttataaggttgttttataattaataagataatatatgtaaagtttttggtatatagtaggtttttaataaacgtaagtaatgattattgtaaattaagtaagttgtatttaatttttatatttttgatttttagttaaatataatatataatttttattatatagttatttaataaatgtttattgggtattttttatgtgttaattagatgttgggagtataatggtgagtaagatgtttattgtttttattgttacgggttttaaagtttagggggttgggagacgagtaggtaattagaagataatgtgggaagtgttttagtagagaaggatatttttttatatagtttagatatttag

SEQ ID NO: 103 - DNA, 5503 bp, Artificial Sequence
  chemically treated genomic DNA (Homo sapiens)
tgggtttaagtaatttttttgttttagttttttgagtagttgggattataggcgttcgttattacgtttagttaatttttgtatgtttttttttagtagagacggggttttattatgttggttaggttggttttgaatttttgattttgtgatcggttttttaaagtgttgggattataggcgtgagttattaggttcgattaataaatttttaatgagtaatttatagttaggtatcgtgattagtgttggggatattgaaaaaatttagagtttttttatgtaggttatagtttgtgggaaagatagttatataaattatgaattattattttttttaaatttatttttagttagttttattttttggggataataaggtttatagataatagattatggaattttaaagttgagtgattttagaaattattttttttattttattattttacggatgaggaaattgtgtttatgatttgttgtgaaaagtattgtgatttttttttatttgtttttaaatgattttatttaggttttaagtttagttagttcgattaatttttattaagtatttattgtaagcggtttttcggaagagttgtagtatagttgtgaagaagatattatttttgtttttaaggaggttatggtttatgggtaaaggatatatatggagataatagttgtgttgtttcgtagaggttttgttagtatagggtattgaaaatatagaaggagtttttgatttgggtttggggagtttaggggaagttttttagaaagaagatttttgagttatgttttgaaaggtaaagagaaatgtgttagatggaaatttgggggaagggtatgttaggtagagggtatggagatgtgaaatagtatgatttacgggagagttataataggtcggtgatgttggggtttaaggaggaaggtggtgaggaatgagtttggaaaggagggtagaaatcgagtgttagtatatttgatgtggagttagtatggtaaaggttatttttattttttttgtttgttttttttgtttttttgaggtaagaagtttttttatattttcgtttgtagattaaagaggtttaatttgttagtttgttattttagggtagtataaggagttgttttttattttttaaggtgtggtttaagttttattatttttaggaagttatttttgataattttttgtttttaatgaattttattgtttcgtttatattttgggatttgtattgttgttttttgttattttatgtaagtataatttgtttttatagtgagattttaagtttttgagggttgggtgtgtgagttatatggtaatgtttaataaatattagtaagaatgaattttttaaatttgggttttaggatatatggcgagggtttgttaaaaggttggataggtttgggtttgattttagttttatggttagttattaattagtaattttgggtaagttttaaaatttttttaatgttttagtttttttatttataaaatgggtgatggttttaatttataggttgttgtgaagatatggttgtggttgggggttaagggaagtattgggggttttttaatagtggggttttggataggtagtaatagcgggaagacgtttgagtgcggtgtatttggagggtaacgtggaaaatttgatatgattaggttttgtggttgagagtttttagttgatttattaatttgtcggtgtttgatagttataaagtatttggtcggtgtttttattggattaaggaaattgaaggtttgagaatataagtaattggttataaagtgggcgagtggtaaagtttgtgttggtgagaaggaaggtagagggtggagcgtatagtttgtatgtaatgatataggaggtagtaatatgttgataaatgttgaatagttaggaaagatttagtaagcggtttttaggaaaatataagttttaatttatagtgttagtcgatttttgtggtgtaaatattttgattatggttgattttaagttgttaatgtgatattattgtggagttaggaagagatgtgtatggatgattagaaggttattttgtttgtggttatatagttatttttgtagtagagaacggttttagtttgggtagtttgatatttgagtttaagttttaaatatgatattgtttttttttttttgtttatgataggatagttgtaataaggggtatgagttggtttcgtggtattagttgttaagttttagtttatttttagataattattgatttttggtgttggtatagttagggttttatttaagttattttttatttttatttatgatggtaggacgtgttttgataggttttatttggattttattggtatagttagaagaattggaggtaagaggttggttagaaaggttagttgaggtagaaggtagtttatgggggtagagtgagtataggaatatttaggtttggagtttgttttttaaaattgattttttatagtttagaaaattgtatttaatattaaaaaattaatacgaatagtatatttttgttattaataatatatttatgataatttattagaggattattaaatttaagtatgcgatttggagttttgaattaagtaggtggttttgtttgcggatggaggagagggagggaaattaagaatatagaagggaagggtagggaaggtagaggatgttgaaggggttgggggtgggttttagagggtttggttatgggaaaatatatgagattttaggtttgtatttgaggtttggtattgtgatttttagtgtgtgtgtgtgtgtgtgtgtgtgtgtgtgtgtgtgtgtgtgtgtgtgtgttggtaggggtaggggaaatgattatgttattgatattaagattattattttatatatatatatatttagagatagggtaatattttgtcgtttaggttgaagtgtagtggcgttattatagtttattgtagttttaaatttttgggtttaagtagttttttttttttagttttttgggtagttggattataggtattcgttattatgtttagttaatttaaaaaattttgtagagtttgggttttgttatgttgtttaggttggtttcgaatttttgattttaattaatttttttgttttgggtttttaaagtgttgggattataggtatgagttattatgtttggttagaattaagattattgtgtaagagtaattgttacgtatttggggtcgtggtttgtattataagtaatatttagtttttaattattagggttaatgggggattggagaggtgagaattgatatatagaggggattttgggtttattttgggggggttttgtttttttttgatttggatatttgttgtttattagttaggaatgttgttttaggagttttttatgtgtatatgtgtgtatgtgtgtatgtatgggttagtgtgtgtatataattatgtatatatgtgtatatatgtttatttgtttatatgttttttggatgtgtgtttgtgtatgtgtgtatggattttttatttttttttttttttatcgagggagggagttggatagaggttaaagggtgatggggaattaagagttagagaggaagaggtttgttttttaaaattttaggtgttttggggaatttttttatggtgattttttttttgatttttaaggttgttgtggttagaaatgaaaatgaatttagttttggttttattttttggaattttttttgtatatagtgggggtttaataaatatttgatgatgatggttttgaatttgggaagttagtagttgtttttagttttgatttttagagttttatggggtaaattaggtagggaatgattatgggggaatttttagtttttttgttagatttttttgtgattatatatttagttgttagggaaggggttggagttatggtttattttatatattttgttttggagaggttagtttttttttagtagttttttttttgttttttttaattaatatttgaataatatttattgaataattattttgtattgaatattatagtggaaatgtattttgggagaaagtatttgatttgtggggttagattgattaagtttaaattttagtatttttaattataagcgggatgatatttgataagttatatatttatgtttgagcgtttgagtgttttttttatttttttttttttttttttttttttttttttttttttttttttttttttaatttttatttgtaaaaggagagtgatgatattatttttgtggggttgatgtgagggttggaaataatagagaggattttgaatacgaggcgtaggtatttagttaatggtaggtgagtttatttatcgggtgttagaaggtgtggattttttttgtttttgtgattttgacgttgttatttaatatttttaagtattaggttttgtaaatgagattatattgtttatttttttgggtgtttggagattgtattcggataatatatgtgaaataatttatcgtaaattttggtggttaataaatgtttgttttttttttcgtttgtttttttattagggtgtatattttttttttttcggaggttttttgttttttttttttatcgtttagcgtgagcgaatattttttatcgtcgtgggtttaagggttgtggttatatttgttagaggaaagaggatagcggtttagtttcggggtgggggagtaaaaattatagtttttagttttcgttgcgtcgttattggggtcggagtttaggacgttaggttttttttttggggaggagtttatgcggggggcggagttaggaggaggttggagagttaagttaagttaatgagattagttgttaataagtgggtttggtttataatgtaatagtggtaggaggaggcgagcgaagttattgagttagcgaggagtgaagttgagtttggttttatacgtttttagaggattattttttgagagagtttttttatttttttttttttttttaagttttttttttgttttttttttttgtttaatataatgtatttttgagtggtagcgtttggattttaggtagttttagagaatcgaagtaagttaaagagaggattggagttaagatattggtgggggagattggatgtttggttttttttgaggatatttttggagcgagggtggttttggggtgggggtttgtgttgtagggaatatagttaggttttaagatggatatttttgggtatttttatgattcgggggtgggggatttggatgaagattttaagtgtttttgtttattttttggggatgagtagtagtagtagtagtagtagtaatagtagtagtagttattatcgttagcgttattagtagttttttagtagtttttgggattttcgttgtagttttagttttcgtagttttagtagtagtagtagtagt

SEQ ID NO: 104 - DNA, 5503 bp, Artificial Sequence
  chemically treated genomic DNA (Homo sapiens)
gttgttgttgttgttgttgaagttgcggaggttgaggttgtagcgagggttttaggggttgttggggggttgttggtggcgttggcggtggtggttgttgttgttgttgttgttgttgttgttgttgttgtttatttttagaggatggataggggtatttggggtttttatttaagttttttattttcgagttatggaagtgtttagaagtgtttattttggggtttggttgtattttttgtagtataagtttttattttaaagttattttcgttttaaagatgtttttaaagaaagttaggtatttaattttttttattagtattttggttttagttttttttttggtttgtttcggttttttggggttgtttggagtttagacgttgttatttaagaatgtattgtattgggtagggagggagagtaggaggggagtttggagaaagaagagggggtgaaagaatttttttaggaggtggttttttaggagcgtgtgaggttaggtttagttttatttttcgttggtttaatagtttcgttcgtttttttttgttattgttatattgtaagttaagtttatttattagtagttggttttattggtttggtttaattttttaatttttttttagtttcgtttttcgtataggtttttttttagaggaggggtttggcgttttgggtttcggttttagtggcggcgtagcgaggattgggaattgtagtttttgtttttttatttcggagttgagtcgttgtttttttttttttgataggtatggttataatttttaagtttacggcgataagggatgttcgtttacgttgggcgatggggaggagggatagagggttttcgaaggaggggaggtgtgtattttgatgagggggtagacggaggggaaggtaaatatttattaattattagggtttacgataggttgttttatatatattattcggatatagtttttaaatatttaaggaggtgggtagtatggttttatttataaagtttgatgtttagaggtgttgagtaataacgttaaggttatagaagtaggggggatttatattttttaatattcggtggataaatttatttattattgattgagtgtttacgtttcgtgtttagggttttttttgttatttttaatttttatattaattttataaaaatgatgttattattttttttttatagatgaaaattggaagaagaagaagaagaaggagaaggagaagaaggagagaaaggaaagtggaaaaaatatttaaacgtttaaatatagatatgtaatttgttagatgttatttcgtttgtaattaaagatgttgggatttgaatttagttagtttgattttatagattagatatttttttttaggatgtatttttattatgatatttagtataaagtggttgtttaataaatattgtttaaatgttagttggggaaaataaaagagaagttgttgaggaagaattggtttttttaaagtagggtgtgtgaagtggattatggttttagttttttttttaatagttgggtgtgtagttatagggggatttggtaggaagattgaagatttttttatggttattttttgtttgatttgttttatggggttttgagagttagaattaggaatagttgttggttttttaggtttagaattattattattaagtatttattaagtttttattgtgtgtagagggggttttaaaggatgggattagagttgaatttatttttatttttaattatagtagttttaggaattagaaaggaagttattatgagggaattttttagaatatttggggttttaaaaggtaggtttttttttttttggtttttgattttttattattttttggtttttgtttagttttttttttcgatgggaagaggaaagggtaggagatttatgtatatatatatagatatatatttagaaaatatgtaagtaggtggatatatgtgtatatgtgtatatggttgtgtgtatatattagtttatgtatgtatatatgtatatatatatatataggaagtttttaaaatagtatttttgattggtaagtagtaagtgtttagattagggagggatagagtttttttaaaatgagtttagagttttttttgtatattagtttttatttttttaattttttattaattttgatgattgagagttaaatattatttgtaatataagttacgattttagatacgtgataattatttttgtataataattttgattttggttaggtatggtggtttatgtttataattttagtattttgggagtttaaggtaggagggttgattgaagttaggagttcgagattagtttggataatatagtaagatttagattttataaaattttttaaattagttggatatggtggcgagtgtttgtagtttagttatttaggaggttgagggaggaggattgtttgagtttaagagtttgaggttgtagtgagttgtgatagcgttattgtattttaatttgggcgatagagtgttattttgtttttaaatatatatatatataaaataataattttgatattaatgatataattattttttttatttttgttaatatatatatatatatatatatatatatatatatatatatatatatatatattagaagttatagtattaggttttagatgtaagtttggggttttatgtgtttttttatgattaagttttttagaatttatttttaatttttttagtattttttgttttttttgttttttttttttgtatttttgattttttttttttttttttattcgtagatagagttatttgtttggtttaaggttttagatcgtatatttaggtttaatgattttttaataaattattatgaatatgttgttagtagtaaaaatgtgttgttcgtgttggttttttagtgttggatatagttttttgggttgtgaaaaattaattttggagaataggttttaggtttgggtatttttatgtttattttatttttatgagttgttttttgttttagttaatttttttggttagttttttgtttttagtttttttggttgtgttaatgggatttaaatggggtttattagagtacgttttgttattatggataaggatgaaagatagtttgggtagagttttaattatgttagtattaaagattagtggttatttggaaatgggttggaatttgatagttgatgttacggagttagtttatgttttttgttatagttattttgttatgaataggaggaggaggataatgttatgtttagagtttgggtttaagtgttagattgtttaggttggaatcgttttttgttgtagggatggttgtgtgattataggtaagatgattttttgattatttatatatatttttttttaattttatagtgatgttatattagtagtttgaaattagttatgattagagtatttatattatagaaatcggttaatattgtaaattagagtttatgtttttttggaagtcgtttgttaaattttttttggttgtttaatatttattagtatattattgttttttatattattatatataggttgtgcgttttattttttgtttttttttttattagtataagttttgttattcgtttattttgtgattagttgtttatgtttttaggtttttaatttttttagtttaatgagagtatcggttaagtattttgtaattgttaagtatcgataggttagtgaattagttgggagtttttaattatagggtttgattatgttaggttttttacgttgttttttagatgtatcgtatttaggcgttttttcgttgttgttgtttgtttaaagttttattgttgaaaagtttttaatgttttttttggtttttagttataattatgtttttatagtagtttgtgagttgaggttattatttattttatagatgaaaaaattgaggtattaaaaagattttaaaatttgtttagagttattaattagtaattagttataaagttggaattaaatttaggtttgtttaattttttgataaattttcgttatatgttttgaaatttaaatttaaaggatttatttttattggtgtttattaaatattattatgtgatttatatatttaatttttaggaatttaaagttttattgtagagataagttatatttatatggggtgataaaaaatagtaatgtagattttaaagtgtgggcgagatagtagagtttattgaaggtagagggttgttaagggtggttttttggaggtggtgggatttaagttatattttaaggaatggggagtaattttttatgttgttttaagatgataggttgataaattaggtttttttagtttgtaaacgggggtgtggaggagttttttattttagagagataggaagagtagataaggaaagtaggggtggtttttgttatattggttttatattaagtgtattggtattcggtttttgtttttttttttaggtttattttttattatttttttttttaagttttagtattatcgatttattgtagttttttcgtaagttatgttattttatatttttatgttttttgtttggtatgttttttttttagatttttatttaatatatttttttttgttttttaagatatggtttaaaggttttttttttgagaagttttttttgaattttttaaatttaaattaggagttttttttgtatttttagtgttttgtgttaatagggtttttacggagtaatatagttgttatttttatatgtgttttttgtttatagattatgatttttttgagggtagggatgatgttttttttatagttgtattgtagttttttcgaagagtcgtttataatagatgtttagtaaagattaatcgaattgattaaatttgaaatttggatgaggttatttgaaggtaagtaagggaaagttatagtattttttataataaattataaatataatttttttattcgtaaaatagtgagataaaaaagatgatttttaagattatttagttttaaaattttataatttattgtttgtagattttgttatttttaaaaggtagaattaattgaaaataggtttaagaaaagtagtggtttatggtttatatggttgttttttttataggttgtgatttgtataaaagggttttaaatttttttagtatttttaatattgattacggtgtttggttatgaattatttattaaagatttattggtcggatttggtggtttacgtttgtaattttagtattttgggaggtcgattataaggttaagagtttaagattagtttggttaatatggtgaaatttcgtttttattaaaaaaaaatatataaaaattagttgggcgtggtggcgagcgtttgtaattttagttatttaggaggttgaggtaggagaattgtttgaattta

SEQ ID NO: 105 - DNA, 5815 bp, Artificial Sequence
  chemically treated genomic DNA (Homo sapiens)
tttttttttcgggaattaaggtgttatatattgttttagttggtttgggatagaggagagaggagtgtatgtaaattttttagtttttttgttttttttgaaatgtggtagtttgagttttacgtttatatttttttattttttttttttaattttttatttagtgagtgttgagtgggtgttcgtaagtattgttgtatagtatttaggtttttagtgagtaatttttaaagtttagtttttttggggttttagtttgttgtgagttttagtttatatttattttttgtatatgttttttttggttttaggatagtattggattttgttgttttttgttgtttttaaaataagagggttatgtgtgcgattatttttggtaattaaaaaaaaaaaaaaaaaaaaggtaaattagtttaaatttggatattattttttttggtagacgagtaaaatttttttatcgttttgttttagagtggtgtttatgaatttttgagattggaaaaggaggttaggttagtatagagaaaggttttattttattattttttcgagaggtattagtattttatttgtagtttttgggttttgaattttattttgtatgagattatatagtgggttgagtttgtagttattacgatgtttttaggaaatgttagaatttatttagagttttagattaacgtattcgtaatatggttatcgaattattttttttttttattttatgtgtagtgtttgttagttttagaaggtataaaattgtagagttatggttttggggatgcgtgtttagattatttatgtgttttataatattgatgtagaaaggttggttattttattttgagaagagaattttgtttattttggttaaaagtttgtaaagggaaagggcgttttttaattgagaagtgaagatttttttttgttagatagtacgggggtttggggggaggggtagaaaataggaatgagatttgataaggaaaggtttttagaagattagagttgttgagaatttttagttttgatggtgggtagtttagaggtaaatatttgagaaaattaagttgtagttttggtttttttattgtgaatttgggttatattatttattatttttttgggttttaatttttttatatattaaaggtagaaaaaaatattatttgttttattttaggatttttcgggttaagcgagataaaatatgtaaaagttttttgaaaattttaaaatttttagtgtttagaatagcgttaaagtcggaagttttttatttattaaatatatagtatttaataggttttagagtttttttttttttttttttttttgagacggggtttcgtattgttatttaggttggagtgtagtggtacgattttagtttattgtaaatttcgtttttcgggtttacgttatttttttgttttagtttttcgagtagttgggattataggtatttgttattacgtttagttaattttttgtatttttaatagagacggggttttattatgttagttaggatggtttcgattttttgatttcgtgatttgttcgttttcggtttttaaagtgttgggattataggtatgagttatcgcgttcggttttcgtttttttaattttatttagttaaggtttataagaatttagtgaaatgggagtttttatttaattttttttataggtaaggtgaagaggttttagagaagttaagttatatttattaagtggtagggtcgagatttattcgaatgttaatttagttttagagttttgaatatttgatattttattttatgtttttttatgaagaagttatttttatattaggggatagagttttggtttttggtaagagaggttgagatatttattattatgttggttaatgaatggagaatataatgagtaaataaattattgtgtaaatatgattgattattgtaaatattttttataatttataattaaattagtgtttttttttgtttatttttttttgattattttttttttattttttgaatttttaaattatttaatattttattttgttatttattattatataggattattttttttttttttgataattttttttggtaaaaggtttttagtaattttgttgtggttgtagagttaattatgataatggttgtagttttgtgtagtaaattcgtggtaattgattgataaattagttttgggggaaaaaaagtttataatagtattgttttaatttatgttataaataattattattttttaatgtttttattttaattgtttattatttggtttttgggtatttgtgaaggggaagatgttattttggagagatggtttattgatttattaggtgtgtgttagatgtttggtgttggttagttttttaaatttatagatttgaggagttaagttatatttttcgtgattgagaaattttgtgtgaagtgtatagtgtgttgtttatttttaaagaaaaggttttttattgtttttttttttagttattgatttttttgtgtatttttttattaatagttttgggaggttgttatttttttttttatttttttaatattgatttttaatgagggggaaaaaaaagttttttggatttttgttttattaatatataaattttattttgggaatattagtagaggtttatagagaatgttttagttttaaaattattgttaagtagtaattttttatttgataaatttattttaattttaaaaaattttatacgtttgttgtatttttttatatttttgtatagaggtttgggatttagggatttttttttaagttaattattttatttatattttgaaggatagtgtagtttatttatgatttttatttttttaatattagaataagtagatatattaaatgttattaaaaatattatattgtattgagagttaatttaatatattgtgtttttaagattagagatttatggaggttgattaatttgttatttaggggattttttaaaaattttgcgtatgtagtttttgtttgtttaaatttaagttgtatatttttagtttaagaaaataaaaataggggggttaggtatggtggtttatgtttgtaattttagtagtttgggaggttgaggcgggtggattatttgaggttaggagtttaagattagtttgataaatatggtgaaatttcgtttttattaaaaatataaaaattagttaggtgtggtggcgggtatttgtaattttagttattcgggaggttgaggtaggagaatggtttgaatttaggaggtagaggttgtagtgagttaagattgtattattgtattgtagtttgggcgatagagtgagattttattttaaaaaaagaaaagaaaaggaaataaaaataggggttatttaggtagttttgatttttttatttgtaaaatgggaattttaatattttattatataattggaaaaagaaagaagatgatagatataaggggtgtttatttgtgttagttatagagtaggtatttatttaatgttaattgaattagaattaagtagaattaaagagttgagagtagaattaattaagttttttgaaagagagagtatagtgtagtaatcgtatggggtgttcgtgttttagtttggtagtttaataattttaattttttttttttttttttgtgaaatgggtatagttatgataattgtaatagattaataaaggtgatgaaagtagtgtatataatgtatatagtatagttgaatatatagtaagttttaataaagttaagtatatatgtatgtggtttttaattatatttattagtaatataaagatggttatatgattaataaagatatatataaatgtatagattattggtaagatggatagaaagattgtagttgataggtgttaggttaataaggatataatgtaggggttgagttttaaaggtaggaatgaatattatttagaagagatagtattatatgttaagtaggataaatagtttttaagtttgggtttgagaaaagttgtgtgtgttttgtggaagagagagaagtagatagtagggttgataaaagaataagaggaggttataaagaataatggtagaggattggaaatgtatattttaagttttattttaagtttttatttgttttgattttagtattattagtgtgttttggtttttttttttagtatatttttaattatatttttaattttagatatagataattatatttttttatttaacggtttttagttgaatgtaattttggaatgtgaaatgatttaaggattatgtaaagttaattttttttttttattatatttatgaaagtattatatatggtaattttttattttgtatttgtaagtttgttttttgatgtttttattattttgtttttttttttttatttgttttcgaattgatgatgatggtgattatgatgataattgtgataaggatattataaatttattgagggttttttttgggttagtttatattttatttttattatattagataataatttattaagttagaagttattattattttaatttttttttttggagggggagatagagttttattttgttatttaggttagagtgtagtggtgttattttggtttattgtaagttttgttttttgggtttatgttatttttttgttttagttttttaagtagtcgggattataggcgtttgttattatattcggttaattttttgtatttttagtagagacggggttttattgtgttagttaggatggatttgatttttcgatttcgtgatttattcgtttcggttttttaaagtgttgggattataggcgtgagttattatattaggtttattgtttcgattttaagaatgaagaaatttagttttagagattgaattttttaagtaaggttaatagttaaatcgtgggattggaatttaagttttaaagtttatagttttgaatattattgaaatgataagttgtaagttgggtttttaaagtaggatatataagaattgaggtttttttaagtttagtgttgttgttaggtatatagtttgatgtttttaaagagattagtttatgatttttggttttttgtttttaatttatttatagttaattttagtgttagtatgtgatgttagtttatgtttagggtatttttgttatttatttttgtttatattgtattttttttttttaagtagtatttgtttgatgtttttaagttaaataatatagaattagataaaatataatattgtatatttttttttttttttttttttgagatagagtttttttttgtcgtttaggttatagtgtagtggcgtaattttggtttattgtaattttcgtttttcggatttaagtaatttttttgttttagttttacgagtagttgggattgtaggtatacgttattgcgtttggttaatttttgtatttttagtagagatggggttttattatgttgggttggttggttttaaattttcgattttaagtgatttattagtttcggttttttaaagtgttgggattaataggtataagttattgcgtttagtttttatttattttgatattttaaaaattaaataattattttttttgtaaatagtttaagatatttttaagaatagtataattaatgttgtaatataagaatattaaatgattttttagttattttgggtatttatgtttgtttttttttattttatttaaatttttttaaga

SEQ ID NO: 106 - DNA, 5815 bp, Artificial Sequence
  chemically treated genomic DNA (Homo sapiens)
ttttaaaaagatttaaataaaatgggaaaaagtagatataaatatttaaaataattggaagattatttgatgtttttatattgtagtattaattatattgtttttaaaaatattttggattatttgtagaagaaatgattgtttagtttttaaaatgttaaagtaaataggggttgaacgtagtggtttatatttgttaattttagtattttgggaggtcgaggttggtggattatttgagatcgggagtttgagattagttagtttaatatggtgaaattttatttttattaaaaatataaaaattagttagacgtagtggcgtgtgtttgtaattttagttattcgtgagattgaggtaggagaattgtttaaattcgggaggcggaggttgtaatgagttaagattgcgttattgtattgtagtttgggcgatagagagagattttattttaaaaaaaaaaaaaaaaaaaagtatgtaatattatattttatttagttttatattatttagtttgaagatattaagtaagtattatttgaaaaaaaagggtgtagtataagtaaaaataaatagtaaaaatgttttaaatatagattaatattatatattagtattgagattaattataagtaggttgaaagtaaaagattagaggttatagattgatttttttggaaatattaagttatgtatttagtagtagtattgaatttaggaaggttttagtttttatgtattttgttttggagatttaatttataatttgttattttagtagtatttaaaattgtaggttttaggatttgaattttagttttacgatttagttgttaattttgtttgagggatttagtttttgagattaaatttttttatttttaaaatcgaaatagtaggtttggtgtggtggtttacgtttgtagttttagtattttgggaggtcgaggcgggtggattacgaggtcgagagattaagtttattttggttgatatagtgaaatttcgtttttattaaaaatataaaaaattagtcgggtgtggtggtaggcgtttgtagtttcggttgtttgggaggttgaagtaggagaatagtatgaatttaggaggtagagtttgtagtgagttaagatggtattattgtattttagtttgggtgatagagtgagattttgtttttttttttaaaaaaaaaaattgaaatagtaatagtttttaatttaatgggttattgtttaatgtaatggagataaaatatggattggtttaagaaaaatttttaataaatttataatatttttattataattgttattatgattattattattattaattcgaagataggtaaagaaggagaagtaggataatggaaatattaaaaaataggtttgtaaatgtaaggtaaggaattattatatatggtatttttatgggtgtaatagggaaggagaattagttttatatgatttttgagttattttatattttaaagttatatttaattaaaagtcgttgagtagaggaatgtagttatttgtgtttggaattggaagtataattgggaatgtgttgaagaggaaggttaagatatattggtgatattgaagttaaaataggtaggaatttagggtaaagtttaaaatgtatatttttagttttttgttattattttttgtaatttttttttgtttttttattagttttgttatttattttttttttttttatagaatatatataattttttttagatttaagtttagaggttatttattttgtttggtatgtagtattgttttttttagatgatgtttatttttgtttttaaagtttaatttttgtattgtgtttttattagtttgatatttattagttgtaatttttttatttattttattagtaatttatatatttatatgtatttttattggttatatagttatttttgtgttgttggtgaatgtgattaaaaattatatatatatatatttagttttattagagtttgttatgtgtttaattatattatgtatattatgtatattatttttattatttttgttaatttattataattgttataattatatttattttataaaagaagaaaaagggaattagagttgttaagttgttaagttgggatacgaatattttatacggttattatattatatttttttttttaagaggtttgattaattttgtttttaattttttaattttgtttaattttaatttaattgatattaagtgaatgtttattttgtggttggtataagtaggtattttttatatttgttattttttttttttttttagttatgtggtgaggtattaaaatttttattttgtagataaagaaattaaagttatttaagtaatttttatttttgttttttttttttttttttttttgagatggagttttattttgtcgtttaggttgtagtgtagtggtgtaattttggtttattgtaatttttgttttttgggtttaagttatttttttgttttagtttttcgagtagttgggattataggtgttcgttattatatttggttaatttttgtatttttagtaaagacggggttttattatatttgttaggttggttttaaatttttgattttaggtgatttattcgttttagttttttaaattgttaggattataggtatgagttattatgtttggtttttttatttttgtttttttaggttaaaaatatatagtttggatttaggtaaatagaaattatatgcgtaaggtttttaaaaaattttttagatagtaaattaattaatttttataagtttttagttttgaaagtatagtatgttagattagtttttagtgtaatataatatttttggtaatatttaatgtgtttgtttgttttagtattgaaggggtgaaagttatgaataaattgtattattttttagagtgtaggtaaagtaattagtttaagaaaggatttttaagttttaggtttttgtataaagatgtgaagaaatatagtaagcgtgtgaagttttttaaaattaaggtaagtttattaaatagaaagttgttatttaataataattttaaaattaaaatattttttataggtttttattaatgtttttagaatgaaatttatgtattgatggaataaaagtttagagaattttttttttttttttattgaaaattagtattgaaagagtagagaaaaaaatggtagttttttaggattgttggtaggaaagtatataaagaagttagtggttgggaaaaagggtaatgggaggttttttttttaaaaatgaataatatattgtgtattttatatagagttttttaattacgaagaatgtggtttaattttttaagtttgtgggtttgggagattggttagtattaagtatttgatatatatttgatgagttaatgaattatttttttagggtaatatttttttttttataggtatttaagagttaggtaatgagtagttaaggtaagaatattaagaaatagtagttgtttatagtatggattaaggtaatgttgttgtaaatttttttttttttaaagttgatttattaattaattgttacgagtttgttgtataaaattgtagttattattatggttggttttgtagttataataaaattattgaaagttttttattaggaaaggttgttaggagggagaagagtggttttgtataataataaataataggatgaaatgttaagtggtttgaggatttaaggaatgaaggagaaataattaaagaaaagtaagtagggaaaaatattaatttggttatgaattatagaaaatatttataatgattaattatgtttgtatagtggtttgtttgtttattatattttttatttattggttagtatggtaataagtattttaattttttttgttagagattagagttttgttttttaatgtggaggtgatttttttataagaggatatggggtagagtgttaagtatttaaaattttggaattagattggtattcgggtggatttcgattttgttatttagtaagtgtaatttaatttttttgggatttttttattttatttgtgaaaggagttgaataagaatttttattttattggatttttgtgagttttagttgaataaagttagaaaagcgggggtcgagcgcggtggtttatgtttgtaattttagtattttgggagtcggaggcgggtagattacgaggttaggagatcgagattattttggttaatatggtgaaatttcgtttttattaaaaatataaaaaattagttgggcgtggtggtaggtgtttgtagttttagttattcgggaggttgaggtaggagaatggcgtgaattcgggaagcggagtttgtagtgagttgagatcgtgttattgtattttagtttgggtgatagtgcgagatttcgttttaaaaaaaaaaaaaaaaaaagaagttttgggatttgttaaatgttgtgtgtttggtaaataaaaaattttcgattttggcgttgttttaggtattgaggattttagaatttttaaaaagtttttgtatattttatttcgtttgattcgaaaaattttgaggtagagtaaataatatttttttttatttttagtatgtaaggaaattaaggtttagaaaagtagtgagtaatatgatttaaatttatagtggagagattaagattgtaatttagtttttttaagtgtttatttttgggttatttattattaaggttaagaatttttaatagttttggttttttggaggtttttttttgttaaattttatttttgttttttatttttttttttaaattttcgtattatttagtagagaagaatttttattttttagttgaggaacgttttttttttttataggtttttggttaaaatgagtaaagttttttttttaggatgaggtggttagtttttttgtattaatattgtgaaatatatgaataatttgggtacgtatttttagggttatgattttgtaattttgtattttttaaaattaataaatattatatatgagataaagaaaaaagataattcggtggttatgttgcggatacgttaatttggaattttagatgaattttagtattttttgaaggtatcgtggtggttgtagatttagtttattatgtggttttatgtaaagtggggtttagagtttagaggttgtaggtgaaatgttggtgtttttcgggagagtggtggggtaaggtttttttttgtgttgatttgatttttttttttaattttagggatttatagatattattttaaaataaagcggtagaaaaattttattcgtttgttagagagggtaatatttaaatttggattgatttgttttttttttttttttttttttaattattaaagataatcgtatatatagtttttttattttggaaatagtagaggataataaagtttagtattattttaaggttaagaaaagtatatgtaaaaggtaggtgtaggttgggatttatagtaggttgggattttaggaaaattgggttttaaggattgtttattggaggtttgggtgttatatagtaatgtttgcgggtatttatttagtatttattgggtaagaaattagggagaagaaataggggaatataaacgtggagtttagattgttatattttaagagaagtagagagattagaagatttatatgtattttttttttttttgttttaagttagttagagtaatatatgatattttaattttcgaaaaagaga

SEQ ID NO: 107 - DNA, 17534 bp, Artificial Sequence
  chemically treated genomic DNA (Homo sapiens)
ttttgttttttttagtttatttttttatatttagggttataaagtaaaatgttgtagtttttgaaatgggagaaaatatttcgtaggatgattaaaattttttaaatttttgtaatatgtagtaaaatggagtataattttaaattgtgtttatttgagttttgtttaaaaatttattgtgttaaagttattattaaatttagttatttaggagattgaggtgggagggttgtttgaattttggaagttgaggttgtagtgagttatgattatgttattgtattttagttagggtgatagagtaagattttgttttaaaataaaataaaatatagaaaaattgttgtgtagttataagattttttaattagttaggatttttagtaagataatgtaatgaattttgggtatatggagagttatgtggttattgataattatgattattttgatagtttttgggaaagaggtgtattttttgtttttttttgttatttggtttgatggtagtgaggatagttttgttgtagtgtttagtagaaatttggatgatgtgttgttaattttggaagggtagtaagtgaatagagagggtgagattagggaataatttgcgggggttgtaattggtttgaggaaaaatttttttttttttttttttttttttttgagatggagatagagtttggtagagtaagttttgttatttaggttggagtgttgtagcgtattttcggtttattgtaatttttattttttgggtttaagtgatttttatgttttagtttttttagtagttgggattatagatgtgtattattatgtttggttaatttttgtatttttagtagagatggggttttattatgttggttaggttggttttgaatttttgattttaggtgatttatttattttggttttttaaagttttgggattataagtgtgagttattatgttcggttgaggaaaaatatttttatagtttaatatattatttttttttatttattattaaaattatattgaaagagttatatttagagtttatattttatgaaagtagtttttttatatggtttaggtttgtttttatgtgattaaattttggtttttttgttttattttatttagagtatagttttggtaatagtgatttagtagtaattaaagtttttagaaagttttttaggttttttttgagtttatatagataataaaaatattttaaaaatattttattattattattgttttattttattttgttgttataatagaatattatatattgggtaatttataaagaaaagaaatttattttttatagttttggaggttaggaggtttaatattaaggtgttggtatttggtaaggatttttgtgttatgttattttaaagcgggggggtaagagagggttaagtttatatttataataatttatttttataataatattaatttatttatgggagtagagtttttatggtttaattattttttattgttttattttttaatattattataatggaagttaaattttaatatgagttttggaggggataaatatttagattatagtaattattagtatgttgtttgtttttttatttttttttttatagaaaaatgtaataaatggaatatattagaaggatttatgggaataatatttagggaaaatgttatttttttttaattaatttagggaaaacgtatagagaaattttaatttttgtgagtttttgttaatgttatggtagtattttagttgtgggttatttggaaattttattattgtagaaggtgataaatattttattatataatgttttatttttttatatttttttagaggtaataattatatatatcgataatgaagatttttttaaatagatacgtggggttttgaagtatttgagattttattgattaattgattttttatttttttattttgtgttaattattttttagaatttggatttgggggattgatttaagattggttgggagaagttagtagggaattttaggatttgtttagaagttgggaagttttattttttttttttttttgagacgaagtttcgttttgttatttaggttggagtgtagtggtacgattttagtttattgtaagtttcgttttcgaggtttacgttatttttttgttttagtttttcgagtagttgggattataggcgttcgttaatacgttcggttaatttttttgtatttttagtagagacggggttttatcgtgttagttaggatggtttggaatttttaatttcgggtgattcgtttatttcggttttttaaagtgtgggattataggcgtgagttattacgttcggtcggaagttgtagattttaaattagttgattagtataggtgtatttaagagttttttaaaataagagttattaatatttaaaagttatagttattagttagggttataattttttgtttagttttttttgttgttgttttttttttttcgagtcgttttttgattttgagagtttttgtttgtttttaggtttaatgtagatttttttttcgagatttgttatttgggaggttattatagtagatggtgatatgggtttagggtagttagtttgtagtttagaatttttgttatgtattgaagtttaaaattattaaattgagtatataagaatgttttggtgttgttttagttttttggttttatttttttatttaattttagttgttaatgattttaagagtaaatagttaaggaagtttgaagattaatagaaattttgagtagatttggtttgtaattatttataaattaattttgttatttttttttttttgtatatgtgtagttttatgaattttattttgaattggttataatattttattggtttttttatgaatgagttatataaaaattttgatatgtttttattttatgttgtatgaaaggtatgatttttgtttttgaaagtattttttaatattaggtatattatatgttaagtatttgtttagatattttatgtgtttattttgtagatatatagaatatatttgtatatgttaggtgttgttttaagtgttttataagtattaattaatttaatttttagaataggattatgttatttaaatttttttttagtttttattagttttattttattaaatggaggtttagagaggtttaaggttgtgttattaaattgtagggtttgtgtgaggttgaggtaattgttttttttagaagatattgggagttttttgttagggattaaatgtttgtgttttttttgtaatttatatgttgagattttaatttttaacgtgatgttattaggtatttggtagataattagttataggtgaggttatgagtataggtttttataatgggatttgtgtttttataagaagtgattaggaagtttattttttttttgtttttaatatgaaggtgtttttttgtaaattaggaagagggtttttattaggaattgattggttagtattgttattttggattttttagtttttaggattgtgacgaataaattgttattgtaagttatttagtttatggtatttttgttatagtagtttgagttaagatatattttttaatggtgttgtaggatggggtgaggaaaggtttttagttttggtttttgggaagttgtatttttatttttattatttgtttgagatagggttttattttgttatttaggttgaagtgtagtggaacgattttggtttattgtagttttaggtttttgggtttaagtaatttttttgttttagttttttaagtagttgggattataggtacgtgttattatgttttgttaatttttgtatttttttaagagatggggttttgttatgttatttaggttggtttcgaatttttgagtttaaattatttgtttattttagttttttaaattgttgggattataggtatgagttatttttttaggttagaatttgtatttttaaagagtagatttttttgttttagttttttgcgtagttgggattataggttcgtgttattatgtttagttgattttttgtatttttagtagagaaggggttttattgtgttagttaggatagttttgattttttgatttcgtgatttattttttttggttttttaaagtgttgggattataagtgtgagttatcgcgttcggtcggtttatttttttaaaaatggttgggtatagtgatttgtggttgtagttttagttatttgggaggttgaggtaggaggattatttaagtttaagagttggaggttgtagtgagttatgatcgtgttattatatattttagtttgggtgatagattaagattttgttttaaaaaaaaaaagtatgattattattagagtttttaggtgatagtgagaggtagtttggtgtaggggatagggtatagttgtaatttgttagattgggtttaaattttaaatcggttatttagagcgtgaatatattagaattggtttaaattagtatttaaaatgttaataggattaagtaagtagtttttttttattttttttataggaggtgagaaaggttttagtaaggttttagaagggaagggcgtggggatgaaagggatttagagagtttgtgtattggtagagaagatagtgtaattggtattgcggttggagggttggttttatagtgagttatagttttgttcgttggtcgtgggagaggtttaaaataaacgtcggaagtaatttttagttttataaagatttgtgatcggtagttttagatttgtttgtttttttgatttttgttttagagtaaaggttatttagtcgtttgaattagttttttttttttattcggtttttaattttgtttattcgataaggaaggttagtatttaaagttaagaagcgttatttattttttcgtgcgttttataaatagtttcgtgagaaagatggtcgggaattcgattttgttggttgttgtttttattttttcggtttgttagtaaagtaagaggtatgggaagttcgtgtgtgtgcgcgtgtgtgcgtgtgtgtgtgtgtgtgataaggtttgcgggagagagagggagggagggagatgggttcggtgttttgttttttatttgtttttgtaggtagttttgggtttttagagtatagtcgttttagggttatttatgtcgtttgttatttttttttttaggggtaagtagagattgagaatattttagagattagtttttttaattggaacgttgtggggttttagagtttagcgattttgtattatttgtgattacgatttatagttcgtttaaacgagcgttagtagtttgttaatttgtaggaagtggtgtgaatattaattataagtgttttaaaggaaacgtgtttgtttttaaatttggttgtgattttttgaacgttgatgttttaattaatgtgtttttttaaataaattgtttatggtggtatgattattagattgaaaaaaattttttttagaaatattagttttagattaagtaattagttttaaattttaaaatagttttttattaggattatttaatatttcgattgtttggttaaatagagggtttttattttatgggagttatatttgtttaatttatattattttatttataatgttagttggggaaaggggttcgagtgtaagagtgtaagattttttattaagtatgtatatttttttatatttttaagtatgtttgtattaggaaatagggttaagtcgtagattgtttaggttatataaatagttagaagtaggaaggttttatagttgaggatttagtttaggttttcgtgtatgtttaatgttttgtttagttagtttgttttgagattgtatgaagattttgaatttttagatttacgttttgtggtttgatttatataatttgttgtggagaagagtaggatatttgtttttaattaaagaagtatttagatttgttaaaaggaaaattttagataaattatatttaattgagtttaattgagtaaagaacgatttatagttgggtatggggaatcggaataggtttagagagattttggggttgttacgtggtagaagaagatttatggatagaaaaaggaaagcgatttttagaaaacggaagtatatagtttacgatgtacggagaaatttttaggttgaatttaaaatatgttagaaggtagttttaggttaaatttaatttagtaggtttaaggtttattgttggtagtattttgatttataggtgttattaaatttgtatgcgtttttattttaggtttgtaggtttatagatgttttaaagttgatagaggtgtttattttttttgtttgttgtttgtgtagggggttgtgtgaattggggttagaatgttagggggttggatggagtgggggtaggggtggggagagaggagaggagattgggtgaatgatgattaatggtggatagggaatgtttaatgataaggtgttagggtcgggtacggtggtttatttttgtaattcgagtattttgggaggttaaggtaggtggattacgaggttaagagatcgagattattttggttaatatggtgaaatttcgtttttatttaaaatatataaatttgttggatatggtggttcgtttttgtagttttagttattagggaggttgaggtaggagaatcgtttgaatttgggagggggaggttgtagtggattgagattatagtattatattttagtttggtaatagagcgagattttattttaaagaaaaaaaaaagatgttgatgaagaggtgaattttgtaaaataattgaaaagttgtattttgagttaaatatgagggacgagtggtcggtgatatagtttaaggagattttaagaatatttgtttaaaggggtttggttatagattggttttatatattttagggagatataagatattaattaatttatgtaagatgtatattagtttggttttaaaaggcgggataattggaagtggggtatgggtttttaggttataggtggatttaaagattttttgattggtaattgattaaaagagtttatttatagattttaaatttatagaagggagtgtttgggttaagataaggggttgtgtaggttaaggtttttattatgtaaatgaagtttttaggtagtatcgtttttaaagaatagattgtaaaaaaattttatgagatttgaaaaggtgttagattttgttaatttttttttggattagagaaaagatttggtaagggaaagggattttttatagaatgtagattttttttataagagataattttgtatgattattttaaaatatgataaagaaatatattttagggtaaaatattttaattttttttaaggtttgttatttgttatgtgatgttatattggagttaggttggaatttggtgttttatttttataaaaagttttaagtgttagattttttaaagggaaggtggggtttaagaaagatatagagagagagagagagagaggagggggagggggtagagggggagagggagagagagagaggttttataataatataggtttattataaaaatttgtggaggtgggggattagtttaatgttagagttcgttattgtttataggttggggtatgtataggtatgggtaggagggttttgggtagtatggtttgttgttttggaggatattgataagatgtttttatgtttaggtggtttggttagggatattttttgggttttgttaggatttgatagggatatttttttagttgggtttttgtttggtagggtatgataaagatgtttttgtgttttgtggttaggtggttaggtaggattttttagggttcgaatttttatggaatgttttattttgataaaggtttgtgaaatggtagggggtttataaaatggtgtagtttggattaatattaaggtttgttttaatgttaatgttggttagttatgtttgaattttaaagggcggaggatataatgaggtatatttgatattttttttttattatggtttgaattcgttttttaggttaattttggaatgtttttggttgagaggaggattttatttagatggttggggggtttagaattttatttttggtttataaaggagagagagagtgtgtaagagggagatagagagaggaagatataattgtttagttggtattaggaattagaatttgttttttttgtaagtttgatgtttatggagtcgggatattatgtgttatggttgaagtagtttaggttttgaagatagatagagttgtatttgttggtttagttattttttagttgggtgttttcgtttaggatatattgttttttaatgttattattaaagagggtttaatgggacgttggggaggaaattttattatagtttttggttttatgtaggcgtttagtattgttagtttttattttaaggttttttttcgaagagagaagtttttgttgtatggagaggtagagatagggtgaaggtatttagttgtggttgggtgggtattatagggggtaaggggtagagaaagttttttttttattttttgaaggtttattgaacgttaattgataaaaggtagattaataggagaaaggttgtgataatttattttaatatgtatagtatgagagaatggttgtttaataatttaaaggggtatagtagtttgtatattattttttataggggagggaggaaatggggaatgtagataatttttttgagtggtagtaaataattattagggagaatgaatggattgggagataaagtaatttgttaatgattttttggaatttgattggttagaggggtaggtttaatttggtgggaaagttcgtttaggtgtgtgtatttttcggtttttttttttatatgagataatgaggtttgagggaggagacggtaggtaattgtgtttgttttagggggtttggtttttaggtagataagggagttttagaggattgtttagttgtattttgtgttttggtagagattataggttgagataggaggtagtggagaggttataaagattttgaggtagtttttttagtttagttatattttgaggtgtaatattttgattttttttcgtggggggcgggggggggggcggttaatagaaatattaaattttgtgaaattttttaaagaggtttattttgagttaatatgagtgattatggttcggagaaaatataaatttaagaagtttttagtgggtggttttaaggtaattgggttatagtttggttttatatattttaaggaggtaggaattataggtaaagatataaattaatatatggaaggtatttattggttcggttttaaaaggtgggatattttaaagttagggggtttatagattataagtggatttagagatttttagatttgtagttgttaaaggagtaaagttttgtttaaagatttgaatttagtataaagaaatgtttatattaagagaaggggtggttaggtgtggtggtttatgtttttaattaagtattttgggtgattaaggtgggtagattatttaagtttaggagtttaagattagtttgggtaatatgatgaaatgttgtttttattaaaaatataaaaaattagttgagtgttgtggtatttatttgtaattttagttatttgggaggttgaggtgtgagaattgtttgagtttatgggttgtagtgagtcgagattatgttattgtattttaaattgggtgagagtgagattttattttaaaaaaaaaaaaaaaaagataaagaggttatgtgatgttatattagagttagttggaaagtaagttatatattgggttaatttaaaagaattggtttaatgagatttgatggtttgtagggcgtgatttaatttttgttttgtaaggttttaggttttgtttataatttgatgtttttttgttgtagtcggttttgttagttttatgatttttattttaattttaattttgggtagttgtgtttaaattttaaaagggagggggtataattaggtgtgttttattttttttttttttacggtagggaatttagttttttaggtttttttggggttttttcggttaagagtgggtttgtttagttgtttgggggttaggattttatttttggtttttttttagtatatgtgtatttttggagaaagttagggaaagaggaaagataggtaaagtaaaaggagattattatttagaggttttaattaatttataagggaaataaagttgaaattttatagaaaaggaggtgaaatagtattttattgttattatatatttattatatatacgtatatatatttttagatttattgttttgtcgttcgggttggagtgtagtggtgtgattttagtttaattgtagtttttgttttttaaggttaagtaatttttttgttttagtttttcgagtagttgggattataggtgcgttattatgttcggttaatttttgttgttgttttttttgtttttttgagagggagttttattttgtggtttaggttggagtgtagtggtgtgatttcggtttattgtaatttttgttttttaggtttaagtgattttttcggtttagttttttgagtatttgggattataggtatacgatattgtatttggttaatttttgtatttttagtagagatggggttttatcgtgtgggttaggttggttttgattatttgattttaagtgatttattcgttttaattttttaaagtgttgggattataggtacgaattatcgtatttggttttatttttattatattattttaaaaatagttatggtttttttgaggttttttatttgagagaatagaagggtttttattttttggggttggaggtgagtttagttgaatttttttttttggggttggattgggagtaggtgggatattttagtattttttttatttattgaagtttattttttatatttgttagtgttataaatagatgtttattgggtgtaattaacgtaagaaaagatagtatttttaaggtttgtttatttttagttttattttgaagttttaggtttttgtgtattattaatttataagtttaggagtatatattttttattatttttattttataggtggaaataagaagatttgttaagtattttttgtaaggttgtgaagtatgttagaagtaatggtaatagtaggtgtagagtggttaagtttttattttttttttaatggataaatttttttagttgagtttatgagttattggtttttttagattgatgttgttttggagggatggagtttagggttggagatagttagggtttatttgtatattttttttttttattttgtttttttaggttgtagtatgaatgagaaaattttaattttaagtatttatatatttttttttttttttttgattcggagtatagtggtgcgattttagtttattgtaattttcgttttttgggttttagtaaattttttgttttagttttttgagtagttgggattataggtgtgtattattaaatttagttaatttttgtatttttagtagagacggggttttattatgttggtcgggtttgttttaaatttttgattttaagtgatttattagttttagttttttaaagtgttgggattataggcgtgagttattattgggttcggatagtatttatatattttagatatttagtgataatgtttaaattttaaataatagtttatttgtagtagaaggggattagtggaagggaagagtttgttttgagagtttttgttatattaggattaatattgattttttgtgagagggggagattatattttgttttagtaggaaatatattgtttttaatatttttaatatagggagagatttaaattatatatttggtgtggaattttaaaaggaaatatttttaaaatattagtaggtaggaaatagatattgaggtattaaaataagttagataaggagatagtgggggagataattggtaaggagttaaaattgaaataaataatgtgaagcgaaataatagttattgtaatttaattgaacgtgggtttatttatttagtatatagaaataaatataagtattaggatttgtagtgatagaaagggaagtattgattgtagggtgttaagtaaggagaattgggtagttaatgtttaagattttaattttttaatggtttttaggtaagtgttttaaaattttatttattttattgttatttgaaatagggttttgttttgttatttaggttggagtgtattgattttggtttattgtagttttgtttttttaggtttaagcgattttgtttatttagttttttaagtagttggaattataggcgtgtattattattatatttggttaatttttgtatttttattttttagatatgggtttttattatgttgtttaggttggttttaaatttttgggtttaagtagtttttttgtttcggttttttagaatgttggaattataggtgtgaattattatgtttaaatgggtttttaaaatttgagatagggttatattatgttgtttaggttggttttgaatttttagttttaagtgatttttttattttggttttttgaaattttggattataggagtgagttaatagatttggtttaagtaagggtttttaaaggtaggggtatattttaggaaagtagaaggtataggaaagataataaattaatatatggaggttatattttggtttggttttaaaaggtaggatattttgatataggggtttataggttataggtggatttagagattttttggtttgtagttggttaagggagtaaggttttgtttaaaaatttgggttagtagaaagaaatattaaggttttaagttaaaaagtatttgagataatttagaaaatttattttgttagggttaaggatatgttcgtgatatagttttaggggtttttgataatatgtgtttaaggtggttagggtatagtttggttttatatattttagggagatatgagatattaatttatttatgttagatgtatattggtttagttcggaaaggcgagataatttaaagtttatatttaggttataggtagataggagatatttttttgagtttttgattagttttttattgaattaaaggaagtaattagatatgtatttgttttaagtgagtagaggaattattttgagttttgtttgttttttgtttataaggaatttttttgtgggtaaattgtgagggagttatgtagttttttttttttttttttttttatttggtgtttaggtaaagtggtttatttttgtaattttagtatttttggaggttaaggcgggtagattatttgaggttaggagtttaagattagtttggttaatatggtgaaattttatttttgttaaaaatataaaaaattagttgggtatggtggtatatgtttgtaattttagttatttaggaggttgaggtaggagaattgtttgaatttaggaggtgaaggttgtagtgagttgagattatgttattgtattttagtttgggtgatagaatgagattttgttttttaaaaaaataaaatttttatagttattttatttaggtatagaatgggaggtaggtttgtttaatgtagtttttagtttgatttttttttttggtttagtgatttgggggttttaagatttattttttttttatgaggtttaattcgtgtgtgtgattttttgtaggttttttaggaagaaatttagaatagggaatggtggttagaatttagtttttagttttcgtttagttgaggtttgtgtgatagtggttagtattttttatttggtggaggttttggtttttgagaaataatttaagaatttatgtgaagacgttgtttttagtttttatagggaatcgaacgttttgtaattttgttttatttgggtgattattatttaaattattattattttttcgtttagcgggattgaaggatagtaaggtgtttggaattttttttgaaggaatttaagagtttttattttcgtgtttgaggtggttagtaggtttttaagagtgttttttgttttgtttttatgttagaagtttattatggggtgaaaagaggaagttaaggataggaggtaagatttattgaaggtttaaaaattgatagaggaggaagtatggatgtggaagtgaaagaagtttatagagtttattataagatgaaggtggttttaggtattagagttgattatttaatgaaataaaggagaagaaagttatattgttttataatagggaaacgtcggtaggtaggagttattatttttaaagtttttttgtatttgttgggtaaggtgttagagttttggtaatggaaagtgattggtttatagggagtaagaatttatcgataataatataggtttgaaaaggaaagttttattagattgagagaaagttgtagaagagtgtagcgggttgttttagcgagaggattgagcgcgtcggggaggattttttttaggggtatttatggattttaaagtaagagtttaggggtaatttggtttatattagttatatatgttatgataaatgattatatttgtagatattttggtgtcgtaatgttagtaagggttgtataatgagttttgttatgtatgtatttcggagatgtatagaggtagagaaagtttagttatatataaattttggggaaagaagtttggaatcggttttagatatagggaagattaattatttttaaattttttagataaggagttttgtttttggatggtcggttttatggttattaggtggtttttgttttttttagtggttttttttttttggtttttttatttttaggtaatttttatgttattatagatttatttgtattttgagaattttatataagtgaaattatttagtagtatttttttttaaaatttttgtttttatttagtataattattttgagatttatttatttttggggggtattaatagtttattttttttttttattgttaagtagtattttattgtatggttttattatgatttatttatttatttatttgttgatggataattttgtgagttagggttttttagagaaatagaattaatatatatatttatatatagatatatatacggagaattattttaaggaattggtttatatagttgtgggggttggtaagtttgaaatttgtaggaaaggttggtaggtaaaagttgatgttataatttggtgttgaaggtagtttggaggtagaagttttttttttttgggggattttagttttattttttagggtttttaattgattggatgaggtttatttatattaaggagggtaatttgttttattttaagttaattgattttaatattaattatatttaaaaaaatatttttatagtaatatttaggttggtgtttgattaaataattaggtatcgtatgttagttaagttgatgtataaaattagttattatagagttgtttttgttataaataaagttgttgtgaatatttgtgtataattttttgtattgaaggaaataaaaatattttatttaagatagatttttttgatagatttttaaatggttttgtaaagttgttttttgtgggggaattttgtattgtggagaatttttatgaatgtagtaaggtttttttttgtttagatttgggagagattaatggagtttgatatttgtaaagatttggaagaaatatttattatttattttttttaaggggttgttatttgtgagatttcgtttgtataatatgatttttttggttagttgagttttttttttttttttttttatattttgttttgttattaaaatttgatttattattataatttgtttttttggttatgttttgagtttgtattgtttttgtgaatttaaaatatttgataggttttaattaatttagaaagtttattttgttaaggttaaggatatgttcgtgatataaaaggatatgttcgtgatatagttttaggaggttttgatgatatgtgtttaagatggttagggtataatttgtttttatatattttagagggatatgagatattaattagtatgtgtaatatgtatattggtttggtttaggtaaggtaggataaattaaagtaggggtttttaggttatagatagataagagataaaggttatatttttttgagtttttgataagttttttattgaatatataatttagtttggtttagtgaatttgtattttttttttttttgagatagagttttatttttgttgtttaggttggagtgtaatggtatgatttcggtttattgtaatttttgttttttaggtttaagtgattattttgttttagttttttgagtagttgggattataggtatgtattattacgtttagtaaattttttgtatttttagtagagatagggtttttttatgttggttaggttggtttcgaattttcgattttgggtaatttattcgttttagttttttaaagtgttgggattataggcgtgagttatcgtgatcggtatatttttatataagtaattagatatgcgtttgttttagatgagtagagggtgattttttgtttagtatttgtgaagataagtttttttttgtgggtaaattgtgttttgtagttattttatttaggaattaaaatgggaggtaggtttgtttgttggagtttttagtttgattttttttttggtttagtgattttggggttttgagatttattttttttttatatttttgtagttttaagatggtatatgaatttttgtattttattgtggagcggggtttttgttttgaaggttgttatgtatatatatgaaataaatgtgtgtgattttttttttaatgtttgttaattaatttgttttatgttagtgatttttagtgaatttttagggggttaagggttttggtttttatagtatggatatataattttgttttttttagggaaatatttatgaatggaatgattgggttatatattggaggtatgtttaattaaaagatttttttttaaattgttttttaaagtggttgtatcgttttatatttttattagtattgtatgaaagttttagttgtttttatatttttttttgttttttttaattgttattatttgtttttttgattttagatattgtaataggtatgtagtattatttaattgtgatttaaatttgtattttattaatgattaatgacgtgttttatttttaacgtaatatttttttttatttgtagg

SEQ ID NO: 108 - DNA, 17534 bp, Artificial Sequence
  chemically treated genomic DNA (Homo sapiens)
tttgtaagtaaagggaaatgttgcgttaaagatggggtacgttattagttattagtggaatgtaaatttaaattataattagatagtattatatatttattataatgtttaaaattaaaaagatagatgatagtaattaaaaaagataggagaggatatgagagtaattgaaatttttatataatgttggtgggaatgtaaaacggtataattattttgaaaaatagtttggaagggagttttttagttagatatatttttaatgtataatttagttattttatttataggtatttttttaagagaaataaaattgtatgtttatattgtaggggttaaagtttttggttttttggaggtttattgaaaattattgatatgaggtagattaattaatagatattaaaagaaagattatatatatttattttatatgtatatatagtagtttttagaataaagatttcgttttatagtgaggtatagaagtttatatgttattttgaggttatagaaatgtgaaaggaaaataaattttaggattttaaaattattaagttaagggaaaagttaagttgagaattttagtaggtaaatttgttttttattttaatttttaaataagatagttataaagtataatttgtttataaggaaaagtttatttttataggtgttggatagaaagttattttttgtttatttgagataaacgtatatttgattgtttatgtaaaaatgtgtcgattacggtggtttacgtttgtaattttagtattttgggaggttgagacgggtggattatttaaggtcgggagttcgagattagtttgattaatatggagaaattttgtttttattaaaaatataaaaaatttgttggacgtggtggtgtatgtttgtaattttagttatttaggaggttaaggtaggataattatttgaatttgggagatagaggttgtagtgagtcgagattatgttattgtattttagtttggataataagagtgaaattttgttttaaaaaaaaaaaaaatgtagatttattgagttagattaaattgtgtatttagtgaaaggtttattaaggatttaaaagaatgtaatttttattttttatttatttatgatttggaagtttttgttttgatttgttttgttttatttagattaaattaatgtatatgttatatatattgattgatgttttatgtttttttgaaatgtataaaagtaagttgtattttgattattttgggtatatgttattaggattttttgaggttatgttacgggtatgtttttttatgttacgggtatgtttttaattttgataaaataaattttttaaattggttgagatttattagatattttgggtttatagaagtaatgtaggtttagaatatggttaaaaaaataggttatggtggtaagttaggttttagtggtaagataggatatgggaggggaagaagaggaggtttagttagttaagggagttatgttatatagacgaaattttatagatagtagttttttagagaaaatagatggtaagtgttttttttagatttttataggtgttagattttattaattttttttagatttggataagggaaggttttgttgtatttatggagattttttataatgtaaagtttttttataaaaaatagttttgtagggttatttgaaaatttgttaaagaaatttattttgggtaaaatatttttattttttttagtataaagaattgtatataaatatttatagtagttttgtttgtaataggaataattttgtgatggttaattttatgtattagtttggttagtatacggtgtttagttgtttggttaaatattagtttaaatgttgttgtgaaggtgtttttttagatgtgattaatattgaaattaattgatttggagtaaagtagattattttttttaatgtgggtgggttttatttaattagttgaaggttttaggaggtaagattgaggttttttaaagagagaggatttttgtttttagattgtttttaatattagattgtaatattaatttttgtttattagttttttttgtagattttagatttgttagtttttataattgtgtgagttaattttttaaaataatttttcgtgtgtgtgtttatgtgtgagtgtgtgtattgattttgtttttttggagaattttgatttataagattatttattaataggtgagtagataaataaattatgatagagttatataatgggatattatttaataataagaaaaaggaataaattattgatattttttaaaaatgagtgaattttaaaataattatgttgaatgaaagtaaggattttaaaaaagagtattattgaataattttatttatataaaatttttaaaatgtaaatgaatttatagtgatataaagattgtttggagatgaggaggttaggagggaggggttattaaagagagtaaagattatttggtggttatgaagtcgattatttagaggtagaattttttatttgaggagtttagaaataattgattttttttatatttaaggtcggttttaggtttttttttttaaaatttatatgtaattagattttttttatttttatatattttcggaatgtatgtatgataaaatttattgtgtaatttttgttgatattacgatattaaaatgtttataaatgtaattatttattatgatatatgtggttaatatggattaaattatttttaagtttttgttttaaggtttataaatatttttaaggaaaatttttttcggcgcgtttagttttttcgttgaggtagttcgttgtatttttttgtagtttttttttaatttaataaaatttttttttttaaatttatattgttgtcggtaaatttttattttttgtgggttaattattttttattgttagggttttgatattttgtttagtaggtataagaaaattttggggatgatggtttttatttgtcgacgtttttttgttataaaatagtatgattttttttttttttattttattagataattaattttgatgtttgggattatttttattttgtgatgagttttgtggattttttttatttttatatttatatttttttttttgttagtttttgagtttttagtaggttttgttttttgtttttaattttttttttttattttataataaatttttggtatggagatagagtaaggaatatttttagggatttgttagttattttaagtacggaaataaaaatttttgagtttttttaagggaaattttaagtattttgttattttttagtttcgttaagcgagaagataataatagtttaaataatagttatttaaataagatagagttataagacgttcggttttttatagaaattaaagataacgtttttatataagtttttgagttgttttttagaaattaggatttttattagatggaaaatgttgattattgttatatagattttagttaagcgggaattgaggattgaattttgattattattttttgttttaaatttttttttgaggggtttgtagagaattatatatacgggttaaattttatgaaaggaaaataaattttaggatttttaaattattaagttaaagggaaaagttaagttgggaattgtattggataaatttgttttttattttatatttaaataagatagttataaagattttgtttttttaagagatagagttttattttgttatttaggttggagtgtagtggtatgattttagtttattgtaatttttattttttgggtttaagtaatttttttgttttaattttttgagtagttgggattataggtatgtgttattatgtttagttagttttttgtatttttagtagagatggggttttattatgttggttaggttggttttgaatttttgattttaagtgatttattcgttttagtttttaaaagtgttgggattatagaagtgagttattttgtttagatattagataaaaaaagaaaaaaaaaaaaaattatatagtttttttataatttatttataaggaaattttttgtggataaaggatagatagaatttaaagtgatttttttgtttatttgagataaatatatatttgattgttttttttgatttagtaaaaggttaattagaaatttaaaagaatgttttttatttatttatgatttggatatagattttgagttgtttcgttttttcggattgaattaatgtatatttgatataaatgaattgatgttttatgtttttttaaaatgtataaaattaggttgtgttttgattattttgggtatatgttgttaggagtttttgaggttgtgttacgggtatgtttttaattttggtaaaataaattttttaaattgttttagatattttttagtttagaattttaatatttttttttgttgatttaagtttttagataaagttttgtttttttaattaattgtaaattaaagaatttttgaatttatttgtggtttgtaagtttttgtgttaagatattttgttttttgaggttaaattaaggtataatttttatgtattgatttattattttttttatattttttgtttttttgaaatatatttttgtttttaaaaatttttgtttgggttaagtttgttggtttatttttgtaatttagaattttaggaggttaaggtgggaggattatttgagattaggagtttaagattagtttgggtaatatggtgtgattttattttaaattttaaaaatttatttaggtatggtggtttatatttgtaattttagtattttgggaggtcgaggtaggaggattgtttgagtttaggagtttgagattagtttggataatatagtgagaatttatgtttagaaaataaaaatataaaaattaattaggtgtggtgatggtgtacgtttgtagttttagttatttaggaggttgagtaggtaggatcgtttgagtttgggaggataaggttgtagtgagttaggattaatgtattttagtttgggtgatagagtaagattttgttttaaataataataaaataaataaaattttaaaatatttgtttgaaagttattggggagttagggttttaagtattagttgtttagttttttttgtttggtattttgtaattaatgtttttttttttgttattgtaaattttggtgtttgtgtttgtttttgtatgttgggtgaatggatttacgtttagttgggttatagtaattattatttcgttttatattatttattttagttttagttttttattagttgttttttttattatttttttgtttgatttgttttagtattttaatatttgttttttatttgttaatattttaaaaatgtttttttttaaaattttatattaagtgtatagtttgggtttttttttgtgttaagagtattagaggtaatgtgttttttattggaataggatatgattttttttttttataagaagttaatattgattttggtgtagtaagggtttttaaagtaggttttttttttttattaatttttttttgttataaataagttgttgtttaggatttaaatattgttattgaatatttaaagtgtgtaaatgttgttcgggtttagtagtagtttacgtttgtaattttaatattttgggaggttgaggttagtggattatttgaggttaggagtttgagataagttcggttaatatggtgaaatttcgtttttattaaaaatataaaaattagttgagtttggtggtgtatatttgtagttttagttatttaggaggttgagataggagatttgttgaaatttaggaggcggaggttgtagtgagttgagatcgtattattgtatttcgagttaaaaaaaaaaaaaaaagtgtgtaaatgtttgggattggagtttttttatttatattgtagtttgagagagtagagtgaggagaaggaatgtatagatgggttttgattgtttttaattttgggttttatttttttagggtagtattaatttggaaaggttaatgatttatgggtttagttaaagggatttgtttattgagggggaaatgaggatttggttattttgtatttgttattattattgtttttaatatgttttatagttttgtagaaaatatttggtaagtttttttgtttttatttataaaatggaaataatgaaaggtatgtgtttttagatttatgaattagtaatgtataggagtttagagttttaaaatgaggttgggagtaagtaagttttaaaagtgttatttttttttacgttaattgtatttaatgggtatttgtttgtgatattagtaagtgtgaggaatgagttttagtaaatggaagaggtattgagatattttatttatttttagtttagttttaagaaagaggatttagttgggtttatttttagttttaagggatagaagtttttttgtttttttaggtgaggggttttagagagattatggttatttttggaataatatgatgagagtggggttaggtgcggtagttcgtgtttgtaattttagtattttgggaggttgaggcgggtggattatttgaggttaggtgattaagattagtttggtttatacggtgaaattttatttttattaaaaatataaaaattagttaggtgtagtgtcgtgtgtttgtagttttagatatttaggaggttgagtcgggagaattatttgaatttgggaggtagaggttgtagtgagtcgagattatattattgtattttagtttgggttatagagtgagatttttttttaaaaaaataaaaagaataataataaaaattagtcgggtatggtggcgtatttgtagttttagttattcgggaggttgaggtaggagaattgtttgattttgggaggtagaggttgtagttgagttgagattatattattgtattttagttcgggcgatagagtagtaggtttgaaaatatatatacgtatatatgatgaatatatgatgatagtggggtgttattttatttttttttttgtagagttttaattttattttttttatgagttgattaaaatttttagataataatttttttttgttttgtttgttttttttttttttttagttttttttagagatatatatgtgttgaggagaaattaaaaatgaaattttaatttttaaataattgaatagatttatttttggtcgagggaattttagagagatttgaaaaattgaattttttgtcgtgaggggaagggaggtaggatatatttggttgtgtttttttttttttggagtttaggtataattgtttaggattaaggttaaaatggggattataagattaataaagtcggttgtagtaagaagatattaaattgtagataagatttaaggttttataaggtaagggttaagttacgttttataaattattaaattttattaggttagtttttttaaattaatttagtatgtggtttattttttaattgattttggtatagtattatatgatttttttatttttttttttttttttttgagatagggttttatttttatttagtttggagtgtagtggtatgatttcggtttattgtaatttatggatttaagtaatttttatattttagttttttaagtggttgggattataggtgagtgttataatatttagttaattttttgtatttttaatagagatagtattttattatgttgtttaggttggttttgaatttttgggtttaagtgatttatttattttggttatttaaagtgtttgattaaaggtatgaattattatatttggttatttttttttttaatgtaagtatttttttgtgttgaatttaagtttttaaataaagttttatttttttaataattgtaaatttgagaatttttgagtttatttataatttgtaagttttttggttttaagatattttattttttggggtcgaattaatagatattttttatgtattgatttatgtttttgtttataatttttgtttttttaaaatgtataaaattaaattgtaatttaattgttttgggattatttattgaaggttttttgggtttgtgtttttttcgagttatggttatttatattggtttagaataaatttttttaaaagattttatagagtttggtatttttgttaatcgttttttttttcgttttttacggaaggaaattagaatattatattttaaaatatgattgaattaaagaagttgttttaaggtttttgtgatttttttattgttttttgttttaatttgtggtttttattaaggtataggatgtagttgggtagttttttgaaatttttttatttatttagaaattagattttttaagataaatataattgtttgtcgtttttttttttagattttattattttatgtggaaaagaagatcgaggaatgtatatatttggacgaatttttttattagattaagtttatttttttggttaattaaattttagagaattattgataagttattttgttttttagtttatttattttttttaataattgtttattattatttaaaagaattgtttgtattttttatttttttttttttttgtgaagaatggtatataaattgttgtatttttttggattattgggtaattatttttttatgttgtgtatattaaaataaattgttatagttttttttttgttaatttgttttttgttagttgacgtttagtgaatttttagagggtgaaggggaagttttttttgttttttattttttgtgatgtttatttagttatagttgggtatttttattttgtttttatttttttatgtagtagaaattttttttttcgaagaaggattttaggatgggaattgatagtgttgagcgtttatatggggttaggaattatggtgggattttttttttagcgttttattaaattttttttgatggtaatattgaagggtagtgtattttgaacggggatatttagttgggaagtggttagattaatagatatagttttgtttgtttttaaaatttaagttgttttaattatggtatatggtgtttcgattttatgaatattagatttgtaaaaggagtaaattttggtttttaatgttagttaaatagttgtgtttttttttttttgttttttttttatatatttttttttttttttgtaaattaaaaataaaattttaagttttttaattatttaaatggagttttttttttagttaagggtattttaaagttaatttaaaaaacgagtttaggttatgatggggaaaaggtgttagatgtgttttattatatttttcgttttttggaatttaggtataattgattagtattaatattgaaatagattttaatgttagtttaaattatattattttgtaagttttttgttattttataggtttttgttaaagtgaaatattttatgggggttcgggttttgagaaattttgtttagttatttgattataagatataggaatatttttattatattttgttaagtaaagatttaattgaagaaatatttttattaaattttgatagagtttaaggaatatttttggttaaattatttgaatataagaatattttattaatattttttagggtagtaagttatattgtttaaaatttttttgtttatatttgtatatattttagtttgtaagtaatggcgggttttggtattaagttggttttttatttttataggtttttgtaataaatttgtgttgttgtaaagtttttttttttttttttttttttttttatttttttttttttttttttttttttttttttttgtgttttttttgaattttattttttttttaaaaaatttaatatttaagattttttgtagaaataagatattaaattttagtttgattttagtatagtattatatgatagatagtaggttttgaaagaaattgaagtattttattttaaaatatatttttttgttatattttgaaatggttatgtaaagttgttttttgtggggaaagtttatattttgtagaaaattttttttttttgttaggttttttttttgatttaggagagaattaatagagtttggtatttttttaagttttataagatttttttataatttattttttgggggcggtgttatttggaagttttatttgtatagtaagaattttggtttgtataattttttattttaatttaggtatttttttttatggatttgaggtttgtagataaatttttttaattaattgttaattagaaaatttttaaatttatttatgatttggaagtttatgttttatttttagttgtttcgttttttgggattaaattaatgtatattttatatgaattggttgatgttttatgtttttttaaaatgtataaaattaatttgtagttagatttttttgggtagatgtttttagaatttttttgggttgtgttatcggttattcgttttttatgtttggtttagaatatagttttttaattattttataaagtttatttttttattaatattttttttttttttttgagatggagtttcgttttgttgttaggttggagtgtagtgttgtgattttagtttattgtaattttttttttttaggtttaagcgatttttttgttttagtttttttagtagttgggattataggagcgggttattatgtttagtaaatttgtgtattttaagtagagacggagttttattatgttggttaggatggtttcgattttttgatttcgtgatttatttgttttggttttttaaagtattcggattataggggtgagttatcgtgttcggttttaatattttgttattaaatattttttgtttattattaattattatttatttagtttttttttttttttttttatttttatttttattttatttagttttttaatattttggttttagtttatatagttttttgtataagtagtaaatagggaggatgagtatttttgttagttttgggatatttgtggatttgtaggtttaggataaaggcgtatgtaggtttggtagtatttgtgagttaggatgttattaatagtgagttttagatttgttaaattaggtttagtttaaagttgttttttgatatattttaagtttagtttaaaggttttttcgtatatcgtgaattatatgttttcgttttttgggagtcgtttttttttttttgtttataaatttttttttattacgtggtagttttagagtttttttgaatttatttcggttttttatgtttaattgtgaatcgttttttgtttaattaaatttagttaaatgtaatttgtttagggttttttttttaatagatttaagtgtttttttaattagaaataaatattttgtttttttttataatagattgtgtgaattaaattataaaacgtgagtttgaaggtttaagatttttatataattttaaaatagattggttaggtaagatattgagtatgtacggaggtttggattggatttttagttgtgaggtttttttgtttttggttgtttgtgtaatttgagtagtttacggtttggttttattttttggtataggtatatttggaaatataaagaaatatgtatgtttggtaagaagttttgtatttttgtattcggatttttttttttagttgatattgtaggtaagataatatgaattgagtaaatgtgatttttatggagtaaaagttttttatttaattaggtagtcgagatattgaataattttagtgggaagttgttttaaaatttagagttaattatttaatttaaagttaatatttttgaaggaagttttttttaatttgataattatattattataggtagtttatttaagaaaatatattaattaaaatattaacgtttaagaaattataattaggtttagaagtaggtacgttttttttggaatatttgtaattaatatttatattattttttgtaggttagtaggttattaacgttcgtttgaacgggttgtgggtcgtaattatagatgatgtagaatcgttgagttttgaggttttatagcgttttagttgggagaattaatttttggaatgtttttagtttttgtttgtttttgggaaggagggtagtaggcggtatgggtgattttgaggcgattgtgttttgaggatttagagttatttgtaagggtaagtaggaaataaaatatcggatttatttttttttttttttttttttttcgtaagttttgttatatatatatatatacgtatatacgcgtatatatacgaattttttatgttttttattttgttgataggtcgagagaatagagatagtagttagtaggatcgagttttcggttattttttttacggaattatttgtagagcgtacgggaagataaatggcgttttttgattttgaatgttgattttttttatcgggtaaataaagttggggatcgggtggggggaaaaggttgatttaagcggttgaatgatttttgttttggaatagaagttaggaaggtaggtaggtttggggttgtcggttatagatttttatggggttgggagttgttttcggcgtttgttttaagttttttttacggttagcgggtagggttgtagtttattgtgggattagttttttagtcgtagtgttagttatattattttttttgttaatgtatagattttttggattttttttatttttacgttttttttttttagggttttgttgagattttttttattttttgtggaaaaagtgagaaggaattatttatttaattttgttgatattttaaatgttaatttaagttagttttaatgtatttacgttttgaatggtcgatttaggatttgaatttagtttagtagattataattgtgttttattttttgtattaggttgttttttattgttatttagagattttgataataattatattttttttttttaagatagggttttgatttgttatttaggttggagtgtgtggtggtacgattatagtttattgtagtttttaatttttgggtttaagtaatttttttgttttagttttttaagtagttagaattatagttataagttattgtgtttagttatttttaaaaaaataaatcggtcgggcgcgatggtttatatttgtaattttagtattttaagaggttaaggagggtgaattacgaggttaggagattaagattattttggttaatatagtaaaattttttttttattaaaaatataaaaaattagttgggtatggtggtacgaatttgtagttttagttacgtaggaggttgaggtaggagaatttgttttttagagatgtagattttggtttggaaggatggtttatgtttgtaattttaatagtttgggaggttgaaatgggtagatggtttgagtttaggagttcgagattagtttgggtaatatggtaaaattttattttttaaagaaatataaaaattagtagggtatggtggtacgtgtttgtagttttagttatttagggggttgaggtaaggggattgtttgaatttaggagtttgagattgtagtgagttaaggtcgttttattgtattttagtttgggtgataaagtgagattttgttttaaataaataataaaaataaagatgtagttttttaaaaattagagttgggggtttttttttattttattttatagtattattagagggtatattttggtttaagttgttataataaagatattatagattgggtggtttataatagtaatttattcgttatagttttgaaggttgggaagtttaagatgatagtgttggttaattagtttttggtgagggttttttttttggtttgtagaaggatatttttatgttggagatagagaaagagtaagttttttggttattttttataagggtatagattttattatgggggtttatgtttataattttatttgtagttaattatttgttaaatgtttgataatattacgttgggggttagggttttaatatatgaattgtagaggggatataaatatttagtttttagtagggagtttttagtgttttttggggagggtagttgttttagttttatatagattttataatttaataatataattttgggtttttttgagtttttatttaataagatagggttaataagagttgaagagaagtttaaatgatataattttattttaaggattgaattagttaatatttatagagtatttaaaatagtatttggtatatataaatgtgttttgtgtgtttgtaaaataaatatataaagtatttagataagtatttagtatataatgtatttaatgttaaaaaatatttttagaggtaaaaattatgttttttatataatataaaatgaaaatatattaaaatttttatgtaatttatttatgagggaattagtaagatgttataattagtttaaagtagaatttatggaattatatatatataggaaagaaggaataataaaattaatttataaatagttgtaagttaggtttgtttaaagtttttgttggtttttaggtttttttggttgtttgtttttgaaattattgataattaagattagataagaaagtagagttaagaagttggggtagtattaaaatatttttgtatatttagtttaatagttttgggttttagtatatggtagagattttaaattgtaaattagttgttttgaatttatattattatttattataataattttttaaatgatagatttcgaaggagaggtttatattaggtttggggataggtagaggtttttaaagttagagaacggttcgggaagagaggaataatagtaggaggagttgagtagagaattgtggttttggttgatgattgtaatttttgggtgttggtaatttttattttgagaaatttttgggtatatttgtattagttaattggtttaaaatttataattttcggtcgggcgtggtggtttacgtttgtaattttatattttgggaggtcgaggtgggcgaattattcgaggttgggagttttagattattttggttaatacggtgaaatttcgtttttattaaaaatataaaaaaattagtcgggcgtgttggcgggcgtttgtagttttagttattcgggaggttgaggtaggagaatggcgtgaatttcgaaagcggagtttgtagtgagttgagatcgtgttattgtattttagtttgggtgatagagcgagatttcgttttaaaaaaaaaaaaaaaatgaaattttttagtttttggataaattttgaggttttttattgattttttttagttaattttaagttagttttttaaatttagattttaagagatggttgatataaagtaaaaaaataaaaaattaattaattaataaaattttaagtgttttaaaattttacgtgtttatttaaaaagatttttattgtcggtatatgtagttattgtttttaggaaagtataaaagaatagagtattgtataatgaaatgtttattattttttgtagtgataaaatttttaggtgatttatagttgaaatattgttatagtattaataaaaatttataaaaattagagtttttttgtacgttttttttggattggttgaagaggaatggtattttttttgaatgttgtttttatagatttttttagtatgttttatttattatatttttttatgaaaaggaaaataagaggataaatagtatattggtaattgttatggtttgaatgtttgttttttttaaaatttatgttaaaatttaatttttattataatggtattaagaggtaggataataaggggtgattaggttatgagagttttgtttttatgaatggattaatgttgttataggagtggattgttataaatgtgagtttggtttttttttgttttttcgttttgggatgatatagtataaaggtttttattagatgttagtattttgatattaaattttttaatttttagaattgtgagaaataaattttttttttttataaattatttagtgtgtggtattttgttatagtaataaaatggaataagatagtaatgatagtaaaatgtttttaaaatatttttattatttatgtaaatttaaaagaaatttaaaagattttttgaggattttggttattattgaattattgttattaaaattatattttaggtaaggtgaaatagagaggttaagatttgattatataaaaataaatttgaattatgtaaaagaattgtttttatgaaatgtgaattttaaatgtaatttttttagtataattttggtaatagatgaaaagaaatgatatattaaattatagaaatgtttttttttagtcgggtatggtggtttatatttgtaattttagaattttgggaggttaaggtgggtggattatttgaggttaggagtttaagattagtttagttaatatggtgaaattttatttttattaaaaatataaaaattagttaggtatgatggtgtatatttgtaattttagttattggggaggttgagatatgagaattatttgaatttaaaaggtggaagttgtagtgagtcgagaatgcgttataatattttagtttgggtgatagagtttgttttgttaagttttgtttttattttaaaaaaaaaaaaaaaaaaaaaaaaaggtttttttttaaattaattgtaattttcgtaaattattttttggttttattttttttgtttatttgttatttttttaaaattgatagtatattatttaggtttttgttgagtattatagtagggttgtttttattgttattaggttaggtagtagaaagagatagaaaatatattttttttttaggaattattagagtgattatgattattaatgattatataattttttatgtatttagagtttattatattattttgttagaagttttgattagttgaagaattttgtaattatatagtagtttttttgtgttttgttttgttttgagatagggttttattttattattttggttggagtgtagtgatatgattatggtttattgtagttttaatttttagggtttaagtaatttttttattttagttttttgagtagttgggtttaatagtggttttaatatagtaagtttttaagtaaagtttagataaatataatttgaaattatgttttattttgttatatgttgtaaaaatttaggaaattttagttattttacggaatatttttttttattttagaaattgtagtattttgttttgtagttttgagtgtgaagaaatgagttaaagaaggtaaag

SEQ ID NO: 109 - DNA, 5690 bp, Artificial Sequence
  chemically treated genomic DNA (Homo sapiens)
aattttattgttttgttatttattgaggtttttttttagtattttgttttttttattcgatatttttttttttttttattttttatattttgtgttgtaagtatattatttgttttttaggtagaagcgagtatttatttttatttttttttttattttgaaattatttatgatatgatattttagaaattcgatttttttgttagtgggagtatattttttatatttattaaaaattttaagaattttatatttggtatgtaatacgatattttttagttttttgtaaaagatgtttagagaaatatgtatgttggtattttataagttaatacggatattttttatattaatagttagtgtttgtttttttttggtaaatggtatgggagttgttgtgtagatatttattagtaaaattgtagaggtttttaattttttatatttggtagaataagtttatgagttatttaatttaaagtatttaattattagtgttttgaaatttagagggaaaaagatatggaaaaagataataatttttggaggttttttttgtgtgtgtgtgtatatttatgatgtattagtgttttatgttttttttttgattgaaataaaataataaaagttgattatttataatgaaagttattttataataattttaaatgttttttattatattttataattttttttatataaatgttagtttttttttttttaaaatattttttaaatttatagtgaaagatattaattttgagagtttattttatgatagatagtgtgttaagtgttttagttttgtatattttaggatataggatgagtttataaattgaagtaaaaatttaaaaagggattttatatgggtgatgtaatatttaggattaatttttatgatatttagttttatttaaatttaaattggttaaaaaatagatgttgtttgacgttttatataaaattgagaagtattaaatatttggaaaatagagttattttagaatttatagattaattttttttgttattgaaagtttcgttgaataaatattttataagaattttaaatattgattaatgaaaaggaagagttttgttttataaaattaatgaatataaattataatatagaaatatttattttaatgaatttgaataagtatatgaaataattttttttttttaaagtgatatatgttgtttaggtgatttatggattttttgaaatttttattatttaattagttatttttagatattatggtttttgtaatggataattatgttaaagtattttttaattattatttagagatatgaatgatttagttattattgttgattaaagagttaaaggaaatataaaattattgtaaattttttaaaattatttttgaaaaataggttttggaaataacgaagttttttttaattttatcgttaaatttgataatgatattttgtttattattattttagttttttaattatgtttttttaatattatgagttttgagttattaatttagattttaagaatttaaaaaatgtgtggaataaaataagaggtttatttttcgttttagaggaaaagttaatttttgatgaaaattaatttttattttattttttaaaatttgagtatggataaagggtaacgttagtaagaaatttatatagaaaagaaaagtagtttgattacgatgatattttttatagtatgttagtattttttttttttggaggatatttgttttttttttttttttattaggtaatatttgtaaaggttaggatgtgagatgtgtgtgagataatgtatgtgtaaatagatttgttttatattttatggatgaaatattttttttaatttaaaaagtaaaaaggtggtattttttaatagtttaattttttaaaattagtaaatttttgtttttttgaggttttttttttgttttgttttgttttataatagtagtttttatatataaggtttgtttttgagttgatttagaataattaattatagtagtttattaatttataagtgatttataagttattagtttaagtaaagataatttgtatttaaaagagttggtaatgtttatattaaagttaagattattataattaaagaaatttgttttttgtttgtatggtttaataaaataagattattggtttatttttgggaagtttggtatatttgattatattataatatttattgagtattttttttgtttttaggattaaaaaattaataagatagtttttgatttttaagagtttagattaatgaagagtaagattaatcgtttttcgttatatatttatatttaaattagtttttttatgttattatagaggttataataaaatttaaaagttattgttttaaagttttaagtatgaagaattttaatttttatttaatatttattgattttttgatttttaattttagatgaatatattagtatattgttttttttgttggttgatatttttttaagtgtttttagtattttattttgaagtataacgttaataatgtataattttttatgtttagttatagaatgtttacgtgtgatttggttataatatattgttttatttaggtttttaataaaattgattttttttaaatggatttgtagttgttgaattttaaattaatattttattttaaaaatagaaaaggaggggaagggtggagggaggggaatagagagggtataagaggtaaaaaaagaaaaagaggaaaataaatgtttgtaaataagttaaattaaataaaagagatataaagtaattttttaaaagaaggaatgatattttaagtaagaattaaatatttaggtatgtataaatcgttttcgtttttttagatcggttttttttttttttttatatatttagtataaattttaggtgagggggtagagaggggttggtattgtttgattaaatatattttgttttttttttgagtggtagaattttagagtttgattaaatgttacgaaagggtgttggtggaagttaggatgagaagaaatgtaatttaatagatttggagaaatgatgttgtagatattaagaatagagaaagttggaaattggtaatatggggaggatagttgggttagaaaggaaaaataggagaatatagaagaaatgttatgagaagggaaaataagagatgttttatttattattatttatttcggggtaggtttttttgtataaggttatttttaggttatattatatataaaagagttatatttgaggtttgtatagtattgttataattatagttttaaaaggttaaggttttatgatggtaggtttaaaaaattttttttaaaatatttaataaaataaggggtatttatttttttttggtttatattatttgaaagttaaaagatagttttcggttttatttaggtttttttttattttattttttgttgttttttattttttggtaaatttggtgaattttttgttagtgttgttttttagtaggtttttattaatagttttgaatgaatattttattagtttttatttattaatagttttgaatgaatattttattagtttttattttgtagtagaatgtatacgtttaggttttagtaaaagttttttagtaaagttttagatttatttagattatatgttatttatgggttaagtattggttttagagtatatgtgtttaaattggttttatttagtttatgtgattatttataaggcgtaatatgggtagtttgttttttatatagtatttagaaatattattttgattgtggtaaatattgtttaattataattttttttttaggttttttttatttatattttttattttatttatagtaaaaattaaaatgttagttttagttttaaggttgtagttgtttgttagattttattttaatttatttttttttttatttatgtgttttaattatttttgttttttgaatgttttttgaacgtttaaggtagtttttagtttaaggttttgttattttttgtttttttatttggaataattttttttacgtatatttttatgttttattttttggtattttttaaattttagcgagtgttttttttttggtgtgttttttttttttttaaattaattaatttaaaattggagttttttttttgtatttattgggttttttttttattttagtttttttagggtatttattataatttaatagattgtatgttttatttatgtatttaattttttatatatgttattttaatttttattaaaatataagatttttgagagtaagtaagtattagaatagtaggaaatatattatagttatttagtgaattattttttgagttaattaattaatggatgagtgaattaatatagttttttgagcgggaaattttgtataaggtttagttaaaagggaaattgagtgggttaggtattacggatattatatattttattgtatgatttttttgtttatattagaagacgtttataagtttattttaaaggatattagttggaattttttttttattaattattaagagaattatgaataagttgtttattatttgatttattatttaattttgatttttagttttttatatttgaaagaagatataatatattttttataggattttgggattattaattgaatttatgtgtgtaaaaggaatttatataatgaaagtattagaaataattattatatttataattattgtatttttatatgtttaaaatatagttataattagtttatttaaatttaagtgtaaaagtaaaatgatttgttttcgttttgttttttttgtttaggggattatggatattgaagtatattttgaaagaattggttataagaagtttaggaataaattggatttggaaatattaattgatattttttaatattagattcgagttgttttttttgagaattttaatatttattgtggggatgttatggatttaggtttagaggttatttttgattaagttgtgagaagaaatcggggtggatggtgtttttaggttaattattttttgtattgggttttgattattattggttttgagattacgatgttgggagggtatgtttatagtattttagttaaaaaatatagtattggtatgatttatttttttttgtaggtgattattgatggtaggaattatattgtcgatgttgggtttggacgtttatattagatgtggtagtttttggagttaatttttgggaaggattagttttaggtgttttgtgtttttcgtttgacggaagagaatggattttggtatttagattaaattagaagggaatagtatattttaaatgaagaatttttttattttgattttttagaagatagtaaatatcgaaaaatttatttttttatttttaagtttcgaataattgaagattttgagtttatgaatatatatttgtagatatttttattatttgtgtttattagtaaattattttgttttttgtagattttagatggggtttattgtttggtgggttttatttttatttataggagatttaattataaggataatatagatttaatagagtttaagattttgagtgaggattttgagt

SEQ ID NO: 110 - DNA, 5690 bp, Artificial Sequence
  chemically treated genomic DNA (Homo sapiens)
atttagagtttttatttagagttttgaattttattagatttgtattgtttttataattgaattttttatgggtgagggtgaagtttattaaatagtgaattttatttggggtttgtaaggaataaaatgatttattagtaaatatagatgatggagatgtttgtaggtatgtatttatagatttaaaatttttaattgttcgaggtttaagagtaaaggagtagatttttcggtatttgttgttttttaggagattagaatgaagaaattttttatttggaatgtattgtttttttttgatttggtttagatattagaatttattttttttcgttaaacggaagatataaggtatttgaggttgattttttttagaaattaattttagaggttgttatatttggtatgagcgtttaaatttagtatcgataatgtagtttttgttattaatggttatttgtaggagaaggtgaattatgttagtgttgtattttttggttggagtgttgtaaatatatttttttaatatcgtggttttaaaattaatagtggttagagtttagtatagaagatgattgatttggagatattatttatttcgatttttttttataatttgattaaaaatggtttttaagtttaagtttatggtatttttataatggatgttaaggtttttaaagggaatagttcggatttggtgttgaagaatgttagttaatgtttttaagtttaatttgtttttagattttttatagttaatttttttaagatatgttttaatgtttatgattttttaagtaaggaaaataaaacgaaagtaaattattttatttttatatttggatttgagtaggttaattatggttatattttaaatatgtaaaaatataatggttataagtataataattatttttagtgtttttattgtatgaattttttttatatatataagtttagttaatagttttagaattttgtgagaaatgtattatgtttttttttaagtgtgagaagttggaaattaagattaaatgatgagttaaatgataaatagtttgtttatggtttttttggtgattaataaaagagagattttaattggtattttttaaaataggtttataaacgttttttgatgtaggtaggagaattatgtaatagagtgtatagtattcgtggtatttgatttatttaattttttttttagttgagttttatataaagtttttcgtttaaagaattgtattgatttatttatttattgattgattaatttaagaaatagtttattgaatagttataatgtgttttttattgttttagtgtttgtttatttttaaaaattttatattttagtgggagttggagtgatatatataggaaattgaatatatggataaaatatgtaatttgttagattgtagtaagtgttttgggaaaattaaagtaaagaaaggatttagtaagtatagagggagagttttaattttaaattagttggtttaaaaaaaaaaaaaatatattaaaaaaaaaatattcgttaagatttgaaggatgttagagaataaggtataaggatatgcgtgaggaggattgttttaagtaggaaaatagaaaataataaggttttaagttggaaattgttttgagcgtttaaaaaatatttaggaagtaagggtaattggagtatatgagtaagaaggagagtggattgagatgagatttgataggtaattgtagttttggagttaagattggtattttggtttttattgtaagtgaaatgagaaatgtaaatgagagaggtttgagagaagggttgtaattgagtaatgtttgttataattaaagtgatgtttttggatattgtgtagagaataggttgtttatattgcgttttatggatagttatatggattaggtgggattaatttgaatatatatgttttaggattagtgtttggtttatggataatatatgatttaagtagatttgagattttattgaggaatttttgttgaaatttaagcgtgtatattttgttataaggtagaagttggtggggtatttatttaaagttattggtgagtagaagttggtggggtatttatttaaagttattggtgagaatttattgaagaataatattaataaagagtttattaagtttattaagagatgaaaaataatagaaggtagaatgaggaaagatttgaatgaagtcgaaagttattttttaatttttaggtaatgtgaattaaaaaaaaataaatgttttttattttgttaaatattttagaaaaggttttttaaatttgttattatagagttttaattttttgagattatgattgtaatagtgttgtatagattttaggtataatttttttgtatgtggtatggtttgaggatgattttgtataaagggatttgtttcgagatgaatggtgataagtggagtattttttattttttttttttataatattttttttatatttttttattttttttttttgatttagttattttttttatattgttagtttttaattttttttgtttttggtgtttataatattatttttttaaatttattagattgtatttttttttattttaatttttattagtattttttcgtaatatttggttaagttttaaagttttattatttagagagagaataagatgtatttagttagataatgttaatttttttttgtttttttatttagaatttgtattgagtatgtaaagaagagagagaagtcgatttaaaaggacgaaggcggtttatatatatttggatatttgatttttgtttagaatattatttttttttttaagaaattattttatattttttttatttggtttaatttgtttataagtatttgtttttttttttttttttttttgttttttgtattttttttgtttttttttttttattttttttttttttttttgtttttaagataaagtgttgatttggaatttagtaattgtaagtttatttgaaagaagttagttttgttagaggtttggatagagtaatatgttgtaattaaattatacgtgaatattttgtggttgaatataagaaattgtgtattattaacgttgtgttttaaggtggaatgttgaaagtatttggaaagatgttaattaataggaaagataatatattaatgtgtttatttagagttgaaaattagaaaattagtgaatattaagtagaggttaggattttttatatttgaaattttaaagtaatgatttttaagttttattgtgatttttgtgatagtatggaaaagttgatttgggtgtgagtgtgtggcggggggcggttaattttgttttttattaatttgaatttttagaggttagaaattgttttgttaattttttaattttgaaagtaaaaaaggtgtttaataaatgttataatataattaaatatattaagttttttaagagtaggttagtaattttgttttattgaattatataggtaggaggtaagtttttttagttgtaataattttagttttaatgtggatattgttagtttttttagatataaattatttttgtttagattgataatttatggattatttgtgaattaatgagttgttataattaattattttaaattagtttaagggtagattttgtatatggggattgttattgtaaaataaaataaaataaaaaaaaaattttaaggagatagaagtttgttggttttggaggattaagttattaaaaaatgttatttttttattttttaaattgagaaagatgttttatttataggatgtaaggtaagtttatttatatatatattattttatatatattttatattttggtttttataagtgttgtttagtaaagaggaggggaaggtaggtgttttttagggagaaaaagtgttgatatattgtaagaggtattatcgtagttaggttattttttttttttgtgtgagttttttgttgacgttattttttgtttatgtttagattttaggaaatagagtaaaaattggtttttattaaggattaattttttttttaaagcgaaaaataaattttttgttttattttatatattttttaaatttttggagtttggattagtagtttagagtttatagtgttgagggaatataattgagagattaaaatggtgatgagtaaaatgttattgttaggtttgacgatagagttgaagaagatttcgttgtttttaaaatttattttttaaaaataattttaaaaagtttataataattttgtattttttttggttttttaattagtaataatgattaaattatttatgtttttgaatagtaattagaaaatattttgatatagttatttattatagaaattatagtgtttgagaatgattgattaaatagtagaaattttaagaaatttatgggttatttagatagtatatattattttaaagggaaaaagttattttatgtatttatttaaatttattaaaataggtgtttttgtgttgtggtttgtatttattggttttataaaataaagttttttttttttattgattaatatttgagatttttatgggatgtttgtttagcgaggtttttagtaataaagagaattaatttgtggattttaaaatagttttgttttttaaatatttggtgttttttagttttatgtaaaacgttaaatagtatttattttttggttagtttgagtttggatagaattaaatattatagaagttagttttaagtattatattatttatataggatttttttttgaatttttgttttagtttatgggtttattttgtgttttaaaatatataaagttaaagtatttagtatattgtttgttataaagtaggtttttaaaattaatgttttttattgtaaatttaaaagatgttttaaggggaaagaaattaatatttatatggggaaaattatgaggtataataggagatatttggggttattgtaaagtgatttttattataagtaattaatttttattattttattttagttaggaggaggatatagaatattgatgtattataaatgtatatatatatatagagagaatttttagaaattattgtttttttttatatttttttttttttaaattttagagtattgatagttaaatgttttagattaagtgatttataagtttattttgttagatatggagggttgagagtttttatagttttgttaatgagtgtttgtatagtagtttttatgttatttgttaagaagaaatagatattggttattaatgtaaaaggtattcgtattggtttatgaaatattagtatgtatatttttttaaatattttttataaaagattaagaaatatcgtgttatatgttaaatgtagggtttttaaagtttttagtagatgtgagaaatgtgtttttattgatagaggggtcgggtttttaaagtgttatattataggtaattttagggtgagaaaaggagtggaaatgagtgttcgtttttgtttgggaggtagatgatgtgtttgtagtatagggtgtaggaggtggagagggaagaagatgtcgaatgaggagagtagagtgttgggaaaggattttagtagatgatagagtagtgaaatt

SEQ ID NO: 111 - DNA, 11473 bp, Artificial Sequence
  chemically treated genomic DNA (Homo sapiens)
tttttgtatagttttttatatattgtaaataatttttagattatatatagtatttaatataatgtaaatgttatataaatagttgttatattgtatttttatttgtatttttttattgttgtattgtttttttttttaaatatattttattggaggttggttgaattagtagatatggaatatataaatataggaggataattatatttaaatttagattaatgtaagcggtgagaaaatattttattttcgtttaagtaggttttattagaggggaaattagatttatttaaagattgttttgattaatttatatatagtttagtgatggatagagtgttagtatttgttatatgtgttattattttatgttagaggtgttaatagattatgtaatttttttgaggaattataatataataattgataataatattgattatataaatatagatttttttgatataggattgttatagatttttaatttgtaaaaaaaaaaaaaatgtaatatttgtggaagtattataaagagaagtagaataaggtagatatgtttgtataagattaagggagaattttaaaagttgtaagagatgtataagggatttttaataaatttatatatttgtggttagtgaatttttgataagagtgttaagtttatttaatgatgaaataatagtttttttaatatatgttgtgagagaaatggatttttatatgtaagattaaagttgggttttattttatattatatgtgaaaaataatttataatttaaatataagaattaaagttatatagaggaaaacgtaagagtaaatttttatgattttgtgttttgggtttttagataagatattaaaagtttaggaagaaataataaaaaataggtaaattggagtttataaaaaatgtgaaatttttatattaaaggatatttttaagaaagtgaaagataatttatagaatgggagaaaatatttgtaaattttatgtttgataatatttagaatatgtaaagaatatttataattcggtcgggtgcggtggtttacgtttgtaattttagtattttgggaggtcgacgtgggcggattatttaaggtcgggagtttgagattaggttgattaatatggagaaattttgtttttattaaaaatataaaattagttaggcgtggtggcgtattttcgtaattttagttattcgggaggttgaggtataagaattatttgaatttaggaggcggaggttgcggtgagtcgagatttcgttattgtattttagtttgggtaataagagtaaaatttcgttttaaaaaataaataaaaaatttataatttaataataaatagataaataatttaattaaatggttaataaaggatttgaatagatatttttttaaggaaggtatataaatggttagtaagtatatgaaaagatgtttaaagttattagtttttagggaaatgtaaattaaaattataatgagatattatttcgtatttgttaggatggttataatttagagggaaaaaaaagaaatataataaatgtgcgtgagaatgtagagaagttggaatttgtgtatattgttggtgaaaatgtgaaatggtgtagacgttgtggaaaatagtttggttgttttttagaaagttaaatatagaatgattatagaattgtaatatcgataattttattttaaggtgtataattaaaattattgaatatagggattgaaatagatatttgtatattaataattattgtaatattatttataatagttaaataatagatgagtggataaataatgtttggtattttttttttttttttttttttttttttttttttttttttttttttttttttttttttttttttttttttttttttttttttttttttttttttttttttttgttagttttgtttttgttgtttaggtttgagtgtaatgatataattttagtttatcgttatttttgttttttgggtttaagtgatttttttgttttagtttttcgagtagttgggattataggtgtatattattatgtttagttaatttttgtgtttttagtagagatggggtttttttacgttggttaggcggtatatatatttttttattattcggttataaaaaggaatgaagttttgatgtatattataatatggatgaaatttagtaataaggtttttgaggaaaaaaagtttagtgaaaaggttatattttgtaggattttatttatatgaaatatatgtaatagataaatttatggagatagaaagtagattagaggttattaggagtggaaggaggggagaatggggatttattatttaatgagtgtagtgtttttatttgtttttgtttttgtttgagatagggtttcgttttgttatttaggttggagtgtagtgttacgattttagtttattgtagttttcgttttttgggtttaagtaatttttttgttttagtttttgagtagttgggattataggtgtatattatttggtaaatttttgtagagatggggtttcgttatgttggttaggttggttttaaatttttgattttaggtgatttgtatgtttttgttttttaaagtgttgggattataggcgtgatttatggtttttgatttaagtgtttttatttgggatgatgaaaacgttttgaaaataaatagttgtaatggttgtatagtattttaaaggtaatttatgttattgaattgtatatttaaaatggtgaaaatagaaaattttatgttatatagattttgttatttaaaaaataaaataaaaaatttaaaatttttatgttattatgaagaagtagttttttaaaggaatagggatgttggtagtagaagggaaagaaattttattaaataaaaataaaagtaatgatttttttaggaggtggtttagttagtttagttttattttagtattatgatggtttattttatttagaaatagaaatatggggcgttggggagaagaggagatgtgtatttgttttatttgtttttttgtttagaatgtcgatttcgatttttgttttttattaaggttggggattaaatgaaaagtgagaatttggaaatttttagagatgatgtttgtcgttggagttgattttattttattttagtagtatgattttttttttaaatttaggatgtaattatggttaattttattagtgtgtagtaattgtttagttttaatattagattagtaggaagttttgttattttttttttgaggatgggtttttattgaattgttttggaatttattattatttaggttataaaagatttagggaattaggttagtttagtttttaattttaagtagggagtaatttgtttagtttacgttgtgatagtttttcgttgttataaggtggtgatgttgtattatatacgcgtatgatgggcgcgtaggcgttaatgtttttaggatttgttgttttatttttaaatgaaagttgtttttaggatttggatttataagataaggtagtttattttttgttggggagtttaggggtaagagggtatttcggagggagggtatatttttatttttgaagataaggagaatattattagtatatagattaattttagtagtgtattttaggatggggagggttattgtgagttatagtaaaatgaacgaatgaatgaattaataaatgtttgagagggaaagttttaacgatttttaggaggtataattaagagttgtagttattttcgttaggaacgttttaaatataggggaaattttttttttttttgttttattgttggagtggggttatttcgggatattagaaattaaggaattgagtttggagaagggatttggggaggttatagtggtaggtgattgttaaatgaggtggtagaagttagtaagcgttggaaaaagtcggtttaaattgtttattagtatcgttttttataattttttatcggttttggttttaagatttttcgttttttaggtatttttttggttttaaattatttttttttaaacgaattttttttgtgaagttattcggtttttttcgatagtggtattttataaaggataatttagtattttaatagcgtgttgcgtttcgcgggacgtagattttttttataggtatttttcgggttgcgtttttatagttatatttattcgtttttttattttttgggtattgttaatgagttttgtattttttttttttggtttttggataaatgaattattcgtgcgtgatttttgcgagggtattttgtataatattagtatattagcggcgtcgtcggtgagtgatttttgggattggttttttttattagcgtaatttttcgggagattcgagtaagttgatgagtgtattagtggtttattttttttgttgtattacggatttttattttgtaatcgggatattagttagagatggggagcgggaggcgtagggtaggggcgtttttttttttagtatagttttttcgcgttggatttttattaatttagtttttatttgtttggaagttagtagggttttttttagttttagatcgtcgggcgaggttttagatggattttaggggcggggagtgggcggagtttaggggtcgaggcgaggtgtgggtggggcgggacgtcgttgtggaggcggggtttgggcgcggacgggcgcggagcgaggtatcgtatcgtcggggcggggagtgggcggggttcgggggcggggcggggtgtgggcggggtttacggtcggggcgggtgagtgggcggggttttcggcgtggtaggcgcgttgcgtaaagaggtttgtagtttcgcggcgcggggtaggtttcgggttgtttaggttggtatcggttcgtggttttcgggggcgtagtcgtagcgttttcgttttttaggcgttagcgagtgcgcggtttagtgcggtcggaatttggcgtaatttttagagcggtttttggggagacgcgggttttagttttgcggtttttattggggagtgcgttggtcggaaggtgagtgattttttgtcggggatcgggggatttgggaaggatagttttcggattggacggttagaacgtttttagggattttagttggtcggttatatggttttgtgggtcgtcgcgttcgggttagggattattttgtatataggatcgtgtttggtttttacggaacgcgtttatacgtagggtttcggtgtcgaatcgtttggtggaatttgtttttaattttatggagcgggtgttggtattatagttatattataagtaggaattagcgggtttaaggttagtttgtaaagggggtatcggggtttaggttcgtgcgttgtttagcgttgttttgaaggcgcggttgaattattggtttgcgttgtttttgttaaggatattgtggtattgtggaaaaaatgaaaaattagtttttttaatttataatttttttgggaaaaaaaaaaattagttttttttttttttttcgagacggagttttattttgtcgtttaggttggagtgtagtggtacgatttcggtttattgtaattttcgtttttcgggtttaagtaatttttttgttttagtttttcgagtatttgggattataggggcgtgttattacgtttggttaattttttgtatgtttagtagagacgggttttatgttggttaggttggttttaaatttttgatttcgtgattcgttcgtttgggttttttaaagtgttgggattgtaggcgtgagttattgttttcggttttttttttttttttttttttttttttagaagagttttattttgttgtttaggttggagtgtagtggggtaattttagtttattgtaatttttgttttttaggtttaagcgattttttttttttagttttttgagtagttgggattataggcgtttgttattatgttcggttaatttttgtatttttagtataggtgggagttttattatattggttaggttggttttgaatttattttttttttttttttttttttttttttttttttttgagatggagttttatttttattgtttaagttggagtgtaatggtataattttagtttattgtaatttttgtttttcgggtttaagttatttttttgttttagtttttcgagtagttgggattataggtgcgtgttattatatttagttaatttttggtatttttagtagaaatggagttttattatattagttaggttggttttaaatttttgattttaggtgattcgtttgtttcggttttttagagtgttgggattaatgaattattgcgttcggttaaaaattagtttttttaatttttaatttttgaaaaaataaattagtttaatttttaattttcgaagattatagttaaagaaatatatgaaaaggaataagtattaaataatatatatttttagttgtgttgtttatagttttgggaaaaaaatggaaataatttaaggttttagaaataggaaaatgggtataaaagggtatgtaggtaatggtttagttgtcgtatgaatatatattgaatatattgtgagatgttgtttgttagaatgtttagtacggggattgtttatatggaaagaggtataggaaaaaaagtgaaaatattataaaataattttttaaaattaaataatgtatacgttaaaaatattagagtttatttgatttggtatatatagtttaataattatatggttttttttttttgtaggtttgggtaggtgtatagtttttaaaaagggagagaattgttattgttgtggatggggtgttaagggaagtgtttggggttaagtgaatagtgatataattgtaagttaagagtttgtgttggagtttttttttattattttaaatagtatagaaaatagagttgagttatttaaatagagttgagttagttatttagtttttggattttagatttttatttttaatcgttagggggatggagatagaagttataaatttatatgttattagttatatgatgtaaatatgtaaattgggttaaggaatataaaagggagtggtgagttggggatattgaagaatggatgttttgtttagaggagtgaaaatgaagtattttatataaataatatgatttcgggtaattattttgggaattaggataaggtgtttttttagtttgtagaaatattggtaatatttataaaggtaaattattttatattattttatttttttttttttttttgagatagagttttgttttgttgtttaggttggagtgtaatggtataattttgatttattgtaatttttattttttaggtttaagtgatttttttgttttagttttttaagtagttgggattataggtatatgttattatattcggataatttttgtattttttagtagagatggtgttttgttatattgattaggttggttttaaatttttgattttaggtgatttttttatttcggttttttaaaatgttgggattataggtgtgagttattataattggcgattattttatattattttttagtttaagaggttttaagggttttttgttaggtttagaataaaatttttatttttattttaggaggggttaggttagattttttttatttttttgattgtatttattattatttattttttttttttttgaattatagtttagttaaataggttttttttttttttttttattttttttttttttttgaaatagagtttaattttgttatttagtttggagtggagtaattttttaattttagttttttgagtagttgggattataggtatgtattattatatttggttaatttttaaaaatttttggtagagatgggattttattatgttgttcgggttggttttaaatttttaggtttaagtgattttttgttttagttttttaaagtgttgggttttttgtttttttgggttttgttaggtttttttatgtattgtgatagttaaagtttgttttttataaagttatttttaggtagtgattgtttattagggtattgtagagttttttagttaatgatgaagttatttattttttttttttttttttttaagataatttttttttagattcgttattttggtttattttgtaagttatagttttattttttattgttaagtgtgggtgttattgttggtttagggagtatggattttgtaaatttgttttatcgggaggttttgaggagtgatttttaggaattagataagtaatttgttttttataattattgtttttttaagaatatttaggattttagttttagtgttaagataattatgtttttttttgatatatgttcgttgttgagaattttaggaaaagtagagggttgtgtaggcgtttttgtttttaggttaggagagttggtaaatgtttggagatttaaaggttttatttttagggcggttaatttttttgttttagtgatatatagattattttttattgtgatttatagtgtaatttatcggtttaaataatattatttgtatttataaatttttttttttttttttttttttattgtttagttttaggtttatttttgtaagtgttgttggtgttagaataggaatttttttgcgttttgaagggatgaatgtgattttttttatatttttcggtgttgtgatgtattttaaatatagtaaggtatttggatataaagtttgtgtttggagtatttttagatagatagtgtatggttttcgttatagatttagtgttattgtagatgtttttgtatggaaaatatataaatataaatatttgtagttgttaatttattattattttgtagttttaagagagtttcgggaatttaggtttttttggtatttttgttttttgtttttggtgtatagtttttatttttaggacgataagaaggttgattgagttttaatattattttatagtttagttgggaagagagttagcgataaagttagagggagttagtttttatattttttagttttagttgagttcgttttttgagggtattttttggaagtttcgtttgtgatttttgttgatattttattggttattttaattgtaaggtagtttaggaaatgtagtgtttatttgtatacgtggatttttggaattaatttagggtttgtttttggggaattagagtggggatatttagttattaaagatgtaggtttttagttgtttagtgaagttaagcgaatggggaaggatttgaagttatttttgggtgtttggagtgattagagttgtttgtttttttggggagtgatagtgttttattttgttaagttttatgtttgtttttaatttagttttagttataatgatgtagtttttttttttttttatttatagggtatttggtttgggtggagtttattttttagtatttattttattttttgtagtattttgtagattttagttttgtgtttgtgtttttggatagttggagataaggagtgggttttggaagatgtttatttaggttttgtttaagattttagttttggtggggataagtattatttttgtgtgtttttgtgttttttgttttgttgtaaagatatattgataggtttacgttgtcgtttggatataatatgcgcgatgcgtgtttttatattaagttttagttatattttttgtattgtttttttattttatttttttttattgtggtatagaatattttatataaaattgattattttaattattttttttgtttgtttgttttttgtgtttttggatagagtttcgttttgttttagtttttcgagtagttgggattataggtgtatattattacgttcggttaatttttgtatttttagtagagacggagtttcgttatgttggttaggttggtttcggatttttgattttaggtaatttatttgttttagttttttaaagtgttgggattataggtgtgagttacggtgtttgattttattttagttatttttaagggtagaattttttggttgtttttatttatgtattgatagatatttgggttgtttttatgttttagttgttgtggaaaatgttgttttgaatatgggtgggtaagtggtttttaagattttgtttttagttttttgggtttagagtaacgaatggaattgttgagttatatgttaatttttatttttttaattgtaatttttgggggtatagtatttttttagtagcggtagtattcgatttttttttagcggtgtacggggttttaattttttcgtatttttatttacgtgtgttttgttttttggtagtagtagttattttaatgcgtgtgatatgggattttattgtggttttgatttgtatttttttaatgattagtgatgttaagtatttttttatggtttattgattatttatatatttttggagaaaagtttatataagttttttgtttatttttgtattgagttgtttgttttgttgttgttaagttttatttgagttgtttttttatggtagggagagtgggtttgttggagtttttttgtattttttagaaggaagttagaattttagagatggttaggagggggtgaggttaaaggtttttttggggagaatttacgtttttttagagttttattgtgtgttagttatcgtatatagtaattgttttttttttatttttttgggttatgttgtgattttgttgatgaggaggttgaggtatagaggggtggagggatgtgttgtagggtttatagttataatgggtagagttggaaattgtattaagtttgtttgatgcgggggttttttttgtttttttggttttcgttgtatttttggagaatttttgagatttttggttagagtttgggtttaagttaatttttattatttttaagtgaggggaagggtcgataattgttagtgttggtttattagagtttggtattagtcgaggagtgtacgtatttattggtggtgtggcggtttattgattttttagttttttgttcgatttacggggaaaattggggaaggtaggaaggttaaggaggtttaatttttgttttttatcgtggtttattttttgggttttttgttgtatgattgtttggatggaaggtttagagtttttttaaaaaaggaaaaaagtatgggttttgatattttgcgtggtttgttttttgaggtttaaatttttagaagatttttggttttttttgagaggtttttttttgatgtgtttgcgtgtttgttaggaagtagtagtgatgtttagatgtggtatattcgattttatttatgtttttttttattttttttgggttcgttttgttttttaga

SEQ ID NO: 112 - DNA, 11473 bp, Artificial Sequence
  chemically treated genomic DNA (Homo sapiens)
tttggaagataaaacgaatttagagggggtggggagaggtataggtgaggtcgaatgtattatatttaggtattattgttgttttttgatagatacgtaaatatattagagaaagattttttaagagaggttaggaattttttggagatttaggttttagaggataagttacgtaggatgttaaaatttatatttttttttttttttgagaggattttgaattttttatttagatagttatatagtaaaggatttaggaaatgagttacggtaggaagtaggagttgagtttttttggtttttttgttttttttagtttttttcgtagatcgagtagaaggttgggggattagtgaatcgttatattattaatgggtgcgtgtatttttcggttggtgttagattttggtgggttagtattggtagttgtcggtttttttttttatttgaaaataatgggagttggtttagatttaggttttaattagaagttttagagattttttagggatgtagcggaggttagaggagtagaggagattttcgtattagatagatttggtgtaatttttagttttgtttattgtagttgtgggttttgtagtatatttttttatttttttgtgttttaatttttttattaataaagttatagtatggtttagaagagtgagagagagatagttgttatgtgcggtggttggtatataatggggttttggaaaaacgtgagttttttttaggggagtttttggttttatttttttttggttatttttgaaattttggtttttttttgggagatataaggagattttaataaatttattttttttattataaaaaaatagtttagataaaatttaataataataaagtaaataatttaatgtaaaaatgggtagaaggtttgtgtaggtttttttttaaagatgtatgaatggttagtaagttatgaaaagatgtttagtattattaattattagggaaatgtaaattaaaattataatgagattttatattatacgtattagaatggttattattattaaaaaataaaatatacgtaggtgaggatgcggagaagttggaatttcgtgtatcgttggggaaaggtcgagtgttgtcgttgttggagaggtgttgtgtttttaaaaattataattagaaaaatgagaattaatatatgatttagtaattttattcgttattttgaatttaaaaaattgaaagtagggttttgaaaattatttgtttatttatgtttaaagtagtattttttataatagttaaaatatggaagtaatttaagtgtttattagtatatgaatgaaaatagttagaaaattttatttttaaaagtggttaaaatgaggttaggtatcgtggtttatatttgtaattttagtattttgggaggttgaggtaggtggattatttgaggttaggagttcgagattagtttggttaatatggcgaaatttcgtttttattaaaaatataaaaattagtcgggcgtggtggtgtgtatttgtaattttagttattcgggaggttgagatagagcgagattttgtttaaaaatataaaaaataaataaataaaaaaagtggttaaaatggttaattttatgtgagatgttttgtattatagtaggaaaaaatgggataaaaaaataatgtagagagtgtgattagggtttagtgtgaagatacgtatcgcgtatgttgtgtttaaacgataacgtgaatttattagtgtgtttttatagtaaaataaaaagtatagagatatataaaagtggtgtttatttttattaggattggaattttgagtagggtttgaatgagtattttttagggtttattttttatttttagttgtttaggagtataggtatagggttggggtttgtagaatattgtaagaagtgaggtgggtgttgaggagtgggttttatttaggttaggtgttttgtggatggaaaggaaaagaggttatattattgtggttgaagttgagttgggggtaggtatgggatttaatagagtggggtattgttattttttaagagggtagatagttttgattattttaaatatttaaaggtgattttaaatttttttttattcgtttgattttattggatagttgggaatttgtatttttagtgattgaatatttttattttggttttttaaggatagattttgaattgattttaggaatttacgtgtataggtaagtattatattttttaggttgttttgtagttgagatggttagtgaggtgttagtagaagttataggcggggtttttaagaaatatttttaagaagcgaatttagttggggttgggaggtgtgggagttagttttttttggttttgtcgttggttttttttttagttggattgtgggatgatgttagggtttagttagtttttttgtcgttttggggatggaggttatgtattaagggtagggagtagaaatattaaaggaatttggattttcggggtttttttggggttgtaagatggtggtggattggtaattgtagatatttgtgtttatgtattttttatgtagaaatatttataatggtattgagtttgtagcgagggttatgtattgtttgtttgaaagtgttttaggtataggttttgtgtttaagtattttgttgtgtttaaggtatattatagtatcggagaatgtgggagaggttatatttatttttttaaagcgtagggaggtttttattttgatattagtaatatttataagaatgaatttaaagttgggtagtgaggaaggaaaggaaaaagaaagtttatgaatataggtagtattgtttgaatcggtaagttgtattataaattataataaaagatagtttgtatattattaaaatagaagagttggtcgttttgaggatgaggtttttgggtttttaggtatttgttagtttttttagtttaggggtaggggcgtttgtatagttttttgttttttttaaaatttttagtagcgagtatgtgttagggagagatatggttgttttaatattgaggttgaaattttggatgtttttgggagggtagtgattgtgaagaataagttatttgtttagtttttgggggttattttttaaagtttttcgatgaggtaagtttataggatttatgttttttgagttagtagtgatatttatatttggtagtgagaagtggggttgtaatttatagggtgagttaaaatggcgggtttggaaagggattattttaaaggaaaaagagaggagagtgagtgattttattattagttgggaggttttatagtgttttggtggatagttattgtttggaggtgattttgtagaaagtaaattttggttattataatgtatagggaggtttggtaaagtttagggaagtagaaggtttagtattttgagaggttgaggtaggagattatttgagtttaggaatttgagattagttcgggtaatatagtgagattttatttttattaaagatttttaaaaattagttaggtgtggtggtgtatgtttgtaattttagttatttagggggttgagattagaggattgttttattttagattgggtgatagagttaggttttgttttaagaaaaaagagaaagtaaaagaaaaaaaagaaagtttgtttggttgaattgtggtttaaaaaaaaaaagagtggatggtggtagatgtagttagggaggtgggaggggtttgatttgattttttttagggtaggggtgaggattttattttaagtttgatagaaagtttttggagttttttaagttggagagtaatatggaatgatcgttagttgtggtggtttatatttgtaattttagtattttggggggtcgaggtggggggattatttgaggttaggagtttgaaattagtttggttaatgtggtaaaatattatttttattaaaaaatataaaaattattcgggtatggtggtatgtgtttgtagttttagttatttgggaggttgaggtaggagaattatttgaatttgggaggtggaggttgtagtgagttaagattgtgttattgtattttagtttgggtaatagagtaagattttgttttaaaaaagaaaaagaaaatagagtgatatgaaatgatttatttttgtaaatgttgttagtgtttttgtagattgggggaatattttattttgatttttaaagtgattgttcgaaattatgttgtttgtatgaaatgttttatttttatttttttagatagggtatttattttttagtgtttttagtttattatttttttttgtattttttggtttagtttatatgtttatattatatggttggtggtatgtgagtttgtgatttttgtttttatttttttagcggttaagaataagaatttgaggtttaagagttgagtgattaatttagttttatttgagtgatttagttttattttttatattatttgaaatagtggggaaagattttaatataggtttttgatttgtagttgtgttattgtttatttgattttaggtattttttttggtattttatttatagtagtgatagttttttttttttttagaaattatgtatttatttaggtttataggaaaaaagagttatgtggttattaaattgtatatattaggttaagtgggttttgatatttttgacgtgtatattatttaattttaagaagttattttataatgtttttatttttttttttgtgtttttttttatgtggatagttttcgtgttgggtattttaatagataatattttatagtgtatttagtgtgtatttatgcggtagttaaattattgtttgtatatttttttgtgtttatttttttatttttgggattttaggttatttttattttttttttaaaattataaatagtatagttagaagtatatattatttaatatttgtttttttttatgtatttttttggttgtgattttcggagattaaaggttaaattgatttatttttttagagattaaaggttaaagaagttgatttttggtcgggcgtagtggtttattaattttagtattttgggaggtcgaggtaggcggattatttgaggttaggagtttgagattagtttgattaatatggtgaaattttatttttattaaaaatattaaaaattagttgggtgtagtggtacgtatttgtaattttagttattcgggagattgaggtaggagaatagtttgaattcgggaggtagaggttgtagtgagttgagattgtgttattgtattttagtttgggtaataagagtgaaattttattttaaaaaaaaaaaaaaaagaaaaagaaaggaagaagaatgagtttaagattagtttggttaatatggtgaaatttttatttgtattaaaaatataaaaattagtcgggtatggtggtaggcgtttgtaattttagttatttaaggggttgaggggggagaatcgtttgaatttggaaggtaaaggttgtagtgagttgagattgttttattgtattttagtttgggtaatagagtgagatttttttaaaaaaaaaagaaaaaagaaaaagagggtcgggagtagtggtttacgtttgtaattttagtattttgggaggtttaggcgggcggattacgaggttaggagtttgagattagtttgattaatatgaaattcgtttttattaaatatataaaaaattagttaggcgtggtggtacgtttttataattttaggtattcgggaggttgaggtaggagaattgtttgaattcgggaggcggaggttgtagtgagtcgaaatcgtgttattgtattttagtttgggcgatagagtgagatttcgtttcggggaaaaaaaaaaaagttgattttttttttttttagagagattataggttagagaagttgattttttattttttttatagtgttataatgtttttgataaaggtagcgtaaattagtggtttagtcgcgtttttagggtagcgttgggtagcgtacgggtttaaatttcggtattttttttatagattgattttgggttcgttgatttttatttgtaatatgattatgatattagtattcgttttatagggttgagggtagattttattagacgattcgatatcgggattttgcgtgtgggcgcgtttcgtgagagttaagtacgattttatgtatagaatggtttttggttcgggcgcgacgatttatagggttatatggtcggttagttgaaatttttgagagcgttttggtcgtttagttcgggaattgttttttttaagtttttcggttttcgataggggattatttatttttcgattagcgtattttttagtaggagtcgtaggattgggattcgcgtttttttaaggatcgttttaggagttgcgttaggtttcggtcgtattggatcgcgtattcgttgacgtttggagggcgggagcgttgcgattgcgttttcggggattacggatcggtgttaatttaagtagttcggaatttgtttcgcgtcgcgggattgtaggtttttttacgtagcgcgtttattacgtcgagggtttcgtttatttattcgtttcggtcgtgagtttcgtttatatttcgtttcgttttcgagtttcgtttatttttcgtttcggcggtgcggtgtttcgtttcgcgttcgttcgcgtttaggtttcgtttttatagcggcgtttcgttttatttatatttcgtttcggtttttaagtttcgtttatttttcgtttttgaggtttatttggggtttcgttcggcgatttgggattggggaggattttgttgatttttaggtaggtggaaattggattgatagaaatttagcgcggggaggttgtgttgagaggagggacgtttttgttttgcgtttttcgttttttatttttggttggtatttcggttatagaatgagggttcgtggtgtaatagaaagaatgagttattgatatatttattagtttgttcggatttttcggggagttacgttggtgagagaaattagttttaaaggttatttatcgacggcgtcgttggtgtattggtattatgtaagatgttttcgtaaaggttacgtacggatggtttatttatttaaagattaaaggagagaaatgtaggatttattagtagtgtttaggagataggggggcgggtgggtgtggttataaaaacgtaattcggggggtgtttgtgaaggaaatttgcgtttcgcggaacgtaatacgttgttgggatattggattgttttttgtgagatgttattatcgggggaaatcggatggttttatagaaaaagttcgtttaaaggaaaatggtttaaggttaaggaaatatttagaaaacggaaagttttgaaattagagtcggtggggagttatggggggcggtgttggtgaatagtttgggtcgattttttttagcgtttgttggtttttgttattttatttggtagttatttgttattgtgatttttttaagttttttttttaaatttaattttttgatttttggtgtttcgggatggttttattttaataatagagtagaaggaaggaaggttttttttgtgtttagaacgtttttaacgaaaataattgtaatttttgattgtattttttgagggtcgttgggatttttttttttagatatttattggtttatttattcgtttattttgttgtaatttatagtggttttttttattttaaggtgtattgttgggattggtttatgtgttgatgatgttttttttgtttttagaggtgagaatgtgtttttttttcgagatgtttttttgtttttgagttttttagtagggaataggttgttttgttttgtgagtttagattttgggaataatttttatttaggaatggaatagtaggttttgggagtattggcgtttgcgcgtttattatgcgcgtgtgtgatgtaatattattattttgtggtagcgaggagttattataacgtggattgagtaagttgttttttgtttggggttgggagttggattggtttagttttttgggttttttgtaatttgaatggtggtagattttaggatagtttagtaggagtttatttttaaaaggaaaataatagaattttttgttaatttggtattggggttgagtaattattgtatattaatgagattgattataattgtattttgagtttgaggaggaggttatgttattaaaatgagataaaattagttttaacgataaatattatttttgggggtttttagatttttattttttatttaatttttagttttagtggaaagtaagagtcggagtcggtattttgggtagggaggtaggtgaggtaggtatatatttttttttttttttaacgttttatgtttttatttttgaataaaatgaattattatggtgttaaggtaaagttaaattagttgagttattttttgaagaggttattgtttttgtttttatttaatgagattttttttttttttgttattagtatttttatttttttggaaaattgtttttttataataatataaaggttttggattttttgttttgttttttgggtagtaaaatttgtataatatgaaattttttatttttattattttaagtgtataatttagtggtataaattatttttagagtgttgtgtaattattataattatttatttttaaaacgtttttattattttaaatagaaatatttgggttaggggttatagattacgtttgtaattttagtattttgggaggtagaggtatgtagattatttgaggttaaaagtttgagattagtttggttaatatggcgaaattttatttttataaaaatttgttaggtggtgtatatttgtaattttagttatttagaggttgaggtaggagaattgtttgaatttaggaggcggaggttgtagtgagttgagatcgtggtattgtattttagtttggatgatagagcgagattttgttttaaataaaaataaaaataaatagaaatattgtatttattggataataaatttttatttttttttttttttatttttggtagtttttaatttattttttgtttttatgaatttgtttattgtatgtattttatataagtggaattttataagatgtggtttttttattaagttttttttttttaaaaattttgttgttgagttttatttatgttgtagtatgtattagaattttatttttttttatggtcgaataatagaaaaatgtgtatatcgtttggttaacgtggggaaattttatttttattaaaaatataaaaattagttgggtatggtggtgtgtatttgtagttttagttattcgggaggttgaggtaggagaattatttgaatttaggaggtagaggtggcggtgagttgagattgtgttattgtatttaagtttgggtaataagagtaagattgatagaaagaaaagaaagaagaaagagagaaagaaaaagaaaggaaggaaggaaggaaggaaggaaggaaggaaggaaggaaggaaggaaggaaggaaggaagggtattaggtattgtttatttatttatttgttgtttgattattgtgaataatattgtaatgattattggtgtataagtatttgttttagtttttgtgtttaataattttggttatatattttggagtggaattgtcggtattataattttatggttattttatgtttagttttttgaggaatagttaaattgttttttatagcgtttatattattttatatttttattaataatgtatataggttttaatttttttatatttttacgtatatttgttatgttttttttttttttttttaaattatagttattttagtaagtgcgaagtggtattttattgtggttttgatttgtatttttttaaggattaatgattttgagtatttttttatgtgtttattggttatttgtatattttttttggagaaatgtttatttaagttttttgttgattatttaattgggttgtttgtttatttgttgttgagttgtaggttttttgtttgttttttgagacggagttttgtttttgttgtttaggttggagtgtaatggcgagatttcggtttatcgtaattttcgttttttgggtttaagtgatttttatgttttagtttttcgagtagttgggattacgggaatacgttattacgtttggttaattttatatttttagtagagatagggtttttttatgttggttagtttggttttaaattttcgattttaggtgattcgtttacgtcggttttttaaagtgttgggattataggcgtgagttatcgtattcggtcgagttgtaggtgttttttatatattttggatgttattagatataggatttataaatatttttttttattttgtaggttgttttttatttttttgaaaatgttttttgatataaaagttttatattttttatgaattttaatttatttattttttgttgtttttttttgggtttttagtgttttatttaagaatttaaaatataagattatgaagatttatttttacgtttttttttatatggttttagtttttatatttaggttgtgaattattttttatatatggtgtgaagtggagtttaattttagttttgtatgtggaaatttattttttttatagtatatattaaagaaattattattttattattgaatggatttggtatttttgttaaaaatttattggttatagatgtatggatttattgaggattttttgtatattttttgtagtttttaagatttttttttagttttatataggtatatttgttttattttgtttttttttatagtatttttatagatgttgtattttttttttttttataaattgaaggtttgtggtaattttgtgttaaggaagtttatgtttatgtgattaatattattattaattattgtattgtgattttttagaaaggttatataatttattgatatttttagtatgggatagtgatatatataatagatattgatattttgtttattattgaattgtgtgtggattgattaaagtaatttttgagtgagtttagttttttttttggtaggatttatttagacggagataaaatatttttttatcgtttatattaatttagatttagatatagttgtttttttgtatttgtgtgttttatatttgttgatttaattaatttttaatggaatatatttgaaagaaaaagtaatataataataaaaaaatataaataaaaatatagtgtaataattatttatatagtatttatattgtattaggtattatatgtaatttagagattatttatagtatatgggaggttgtgtaaagg

SEQ ID NO: 113 - DNA, 6106 bp, Artificial Sequence
  chemically treated genomic DNA (Homo sapiens)
gttgttgagggaattaagtatagtttatatgattttatagggaaaggatttttagaaatttttatatttgttttttattggatattgtcgtatatgttttttttttttatttatatgttttgtatttttttattgtaatatatgatagttatgaataagattatgagtttttttagtaaattattaaattagaagatttatatggtttttatattaatgaattttttaatattgtattaatattatatttttagaataaattatatttgattaaaatgtattagttttttaatgatgtgttatattgttattaatatttttatattttaattaatattaataattgatatttgtttataatttttttttttaattgtattaggtttaggtataaatgttatatttattttataaaaagtattagattttttttaattttttgaaatttttttttttataaggtgtaaaaatttttaaaattattgggattatttaggttttgaaattttgatataagttttttttgaaattatttgggtttaatgattgattttgaggaagtgttttgataaatttttttttttttgatagagaaattagtttatttaaattttttatatatagtagggtttatttgggtaaattatatttttgtaggaaattattattatattttttaaatatataatagagagattgtaggattttttaaatgtattatatgttatgttaatggttattttttttttgtttttttattatatatatattttagttaaggtagttagtaattggttttttttgaaaattttttattaaaaaatattatttttatttagtaattatgtgttttttaatttagataaattgataaagtaaatattgtttattttttgttttattgtttttttattttttttgtttgttttttttattttgtttaatatgaaaattttatttatttataatttgtatttttattaataaaagggtttagggttataaaattttttttggttatatttttgaatgtattataggtgttttgatatagaatatttttattatttatgatttttattaaaaaatatttttggattgtattttatttttaatttaagagtttaatttaaaaagggaaagaaaaatgatagaagtaggttaggtatagtggtttatatttggaattttagtattttggaagttgaggtaagaggatatttgagtataggagttataaattgttttgggtaatatagtgagattttgtttttataaattagttttaaaagttagttaattaatttggaaagatggtttgagtttgagaggttaaggttatagtgagttatgattgtgttattgtattgtagtttagaagatagagtgagattttattttaaaaaattatagaagtaataatattataattatatataattaaattatattgtaaatattaaaaattttatttgttttaaatttttatattaattatgtatagttgtaatagttgtatagtaaatagttgtatatagtttttattttttattagatattttattaaaaaagaatttaaaatttatgggaaaattttgtattttgtgttagaaatttagttttttggtttttttatttttatttgatggagggtaaagaattttattagtttgtaggttacgtagagataaattagaaaagaaatataaaatagaaatattttgtgtatagtatattgtttaaagatgagataaattggtttaaaaatgatatggtgtaatggagatatttaagagtttgttagtaatttttataggttttaagaggtttaaatagtttagaaatagaatagaatatgatttagtatatttttagagaatttaaaagtttttgtaaagtttatttaggaaatttttagggaaaaataaattttgtttttttttttatttggtaattttttatatttttagaataagtttgaaaattattttacgttggttttaatattttataaatttggtaatagtgataggagttatgttattttgatagttggatttgattaaattaagttagtggttattagtgtttgttaattttaatgatggtaggtagattttttaaagtggtaattattttgaacgtggtttattttttatttttttaaaaattaattaattaattaattaatttttgtttgtttttggtatttttagtaagtatttttttagtattttttgtatttttattttttttttttgtaaattgtttatatgtaattattaagtattttaatgataatttttgtttttattttcgttattttattttttttttgttagtgattttttttttaatattacgtatttattttatatagatcgttttaaaatttttttattttttattttttttagtttttttttagtaattggttagttaataagtttttttgattaagttattattttttattggaattgttgtaatagttttttgattggtttttttgatttttgtttttgttttttatagtttatttttaataagataattagtgtgataaagtaattaattaattagttaatattgttttttttatgatgaaatgtttttattttaatggtttttgttgtttttaagagttaaagagaaattattaaaatagttattaatgtttatattttagttttttaatatattatattaatatattatatattaaatgttatatatataattaattatatataatataattatatgtattatttatatattaatataaattaatataatataattatatattatattaatataattatatattaaatatattatattaaatattaaatatattatattatattgattatataattattataaattaattatatataattattataaattaattatatataattattataaattaattatatataattattataaattaattatatataattattataaattaattatatataatataattatatatataaagtttttatatattaaatattatatatttataatattatatatataatatttatattttttttattttttatagtattttatattatttgtggttttattggagttattgtattgaatttgttgttttttatttaagttaaattttttgtttatagtgaaaggaatagagaaagatgtagggagattttttgaaattattgttatagaataaaagatgaaatgtttttaattattgtaaatataaaattgtatgtagtattgtgtaaagataatgttaggttggattgttagaatgagttaatagcgcgtgacgtgtttttttttgtagagagtttatgaatggacgtgcggttagggaggttttatattattaagatttttattttagaaaagtagatgtttatagttttaggaatggaatgcgatttttgtggagagtttataaacggatgtatggggcgggggggtgtttgtttatatggataagatagggttataaacgtttttattttgttatggtttttttatatttttttagggttaaggtatatttttttttgagaatttttcgtttaattagttgtttatttttacgttttatttttatggattgtttgtaattagtttttgttgtaattgttattgttgattaatattttgttaattataggttatggaaagattgtgtttttgttttaaggttttgttagaaattattaatatatatattatattgtaaatttttatttttgtatattgtatttttttatataaatgtattgtatttttatatataaatgttatgttaaagaattattttatttttatgtgattattttattttataattaaatgattttaaattttttattaatttatttttgtttttattaaatttaataataaatgttggtatatttagtgtattgttggtatcgtgggattagaaggtagtgatttttttggatttagtttttattattttgtgtgtgtttattattttttaatttgtcgattcgtttaagaataaagagagagtttcgttgtattgtaggttgttggttagattttataatatatatatagattttaaaatgtatttttaatttttaaaagattttggttatttattattattttgtttatttttttgtaattgagaaaagtatttgttaatttattttttttttttgtgatagtttagttatttataaagttttattttatattttatttttttttttaatttgtgttaaaatattgtgaaaattaatatttttttggaatataatttttttattataaattaaatattgatataattgtaaagtaaataaatgaatttttataaagttaatttatttttatattttttatatttattattttaaatttttgttatatttttaattttgtttgaaatattatatggtattttaaattgaaatttattaattattttttagttagtggataaagagaaattaaaaatttgaataaattaatttaatttttattttattttttatttgaaggtttttttagtaatttattaaaagaagttttttttttttttttttttttttttagtttagattttaatttttattttgtttattttggttaaattttttaattttggttattttttaattatattttaatttttaagttatgtaatttttcgaggtttttgtttgtttttttaattgtttattaagacgttttatattttagtaaaaagattatatatatttttttaatgttttggagttatagttatgtatttaaaatttattttatttttatttttattttttttttatttaaatttatttttgggtttttattgattagtgtttttaagtttgtttgttttagtttatgtagttttttttttggtattgggataaatatttgtattattattttaaaggttattattattttttatttgtgaagagtagaatatgaagaaatttattttatttagatattttttagatttttaaagattagagattattttttatttttttaggagtatttattttaggaagtaattagataaaaggtaaggtataaatattttttttaattgtttgtattttataaatttaattttatgaatatatttgttttgattagaagtttgtaattaaatttaattagaattaagaatttttttggttttattttagtaaaaaaaattagtgtaaatagggggagaaaaataagatttttttgtcgtattttttagttaatttttaagataaaaattttgaaataattttttatttatttttttttttaagagttttaaagttattatatttatatttaaattttattattcgataaatgtgtatgtgtaaatattatatgtatgtgtgtatatatttatgtattagatatatatatatgatattgtacgttaagttatgtttttgtttgaagattgtatgtttatgtatggttataggaatatttttattttatgtatttttttagagttgaattattttttttttatgaaaaagtatggttaatatttaagaataaggtagaaagtattttttttaaatatttaaattatttgttttaaaaataatttattgaagaattatttttattttatttaattatttaaattaagaaataagattaataatttagagagattattaattatttaatttttatttggaaaagattattataattttgatttaatattttatttgtataggaaatgattattatgtaaatttgattttgatttaattaatgtaggatttttagatttgagttattcgattttgatacgattttttgtttttatttttaaagttttagtatttttaatgtttattaagttttataatgaaatttagtaatgataaatgttttattttataaagtttattttaaatgtttaaggttttattattattttattgtttatttttagaaatatttcgagtgttatgttgtttgaaaagaagttaaataagtatatattagatttattttatgtaaatattttttttagttaaaagtttttttattttggttaaatttataa

SEQ ID NO: 114 - DNA, 6106 bp, Artificial Sequence
  chemically treated genomic DNA (Homo sapiens)
ttgtaagtttgattaggatagaaagatttttggttgaaagaaatatttgtataaagtaaatttgatatatatttatttaatttttttttaagtaatatgatattcgagatatttttaaagataaatagtgagatgatgataaaattttagatatttgaaatgaattttataaaatgaaatatttattattattaagttttattatgaaatttgataagtattgaggatattaaggttttgaaaatgaaaataaagaatcgtattagaatcgagtagtttaaatttaaaaattttatattaattaaattaaaattaagtttgtatagtaattattttttatgtaagtagaatattgaattaaagttatgatagttttttttaaatagaaattaaataattaataatttttttaaattgttagttttgttttttagtttaaatgattgggtggggtagaaataattttttaatagattatttttagaataagtagtttaaatatttaaaggaaatgttttttgttttgtttttaagtgttaattatgtttttttatagaaaggaaatgatttagttttaaaaaagtatatgaagtaaaaatatttttgtaattatatataaatatatagtttttaaatagaaatatggtttggcgtataatgttatatatatgtatttgatatatagatatatgtatatatatatataatatttatatatatatatttatcgaataataggatttaaatgtgaatataatggttttggaatttttaagaaaggaagtaagtagggagttattttaaagtttttattttagaagttaattaaaaaatgcggtaaaaaaattttatttttttttttttatttatattaattttttttattgagatgaaattaaagaaatttttaattttaattaaatttgattgtaaatttttagttaagataaatatatttataagattagatttgtaaaatataaataattagaaagagtatttgtattttattttttatttggttgttttttgaagtgagtatttttaggagaatgagaaatgatttttaatttttaggaatttggagaatatttgaataaagtagatttttttatgttttattttttataggtaaagagtaatgatagtttttaaaatggtaatataagtgtttattttagtattagaggaggagttatatgaattaaggtaggtaggtttgaaagtattaattagtgaaaatttaaggataagtttgggtggaggaagggtgggagtagagataaaataaattttgagtatatgattatggttttaaagtattgaagaaatatgtgtgatttttttgttaaggtgtaggacgttttaatgagtagttgaaaaaataaataaaaatttcgaagagttatatggtttagggattggggtataattgaaaaatagttagagttgagaagtttagttagaataggtagaatgaagattagaatttaagttaaaaaaaaaaaaaaaaaagagagagattttttttggtaggttattgggaagatttttaaatgagaagtgaagtaaaaattgaattaatttgtttaaatttttaatttttttttatttattggttaaaaaataattagtaaattttaatttaaaatattatatgatattttaaataaaattgaaaatgtaataagaatttgaagtaataagtatggaaaatataaagataaattagttttatggaaatttatttgtttattttgtaattatattagtatttaatttataatgaaaaagttgtgttttaaagaaatgttaatttttataatgttttagtataaattgaaggaaggagtaaagtataaaataaaattttgtaaatgattgagttgttatagagagaaaaaatgagttgataaatattttttttaattatagaaaagtagatagaatagtgataagtaattaaaattttttaagagttaagaatgtattttggaatttgtgtatgtattgtgggatttggttagtagtttgtaatgtaacggggttttttttttgtttttaggcggatcggtaggttgagaaataatagatatatataagatagtgaaagttgggtttaggggggttattattttttggttttacggtgttaataatgtattggatatattagtatttattattaagtttagtgagggtaggggtaggttagtgagggatttagggttatttgattatgaggtgagatggttatatggggatgaagtaattttttaatataatatttgtatatagaagtatagtatatttgtatggagaagtatagtatatagagataagaatttataatatagtgtgtgtgttagtaatttttaatagagttttaaaatagaaatataatttttttataatttatgattagtaagatattaattagtagtaatagttgtaataaaagttggttataaataatttatggaaataggacgtgaagatagataattggttagacgagaaatttttagaaaggagtatgttttaattttaaagaggtgtagaagagttatggtaagatgaggacgtttatagttttattttatttatatggataggtattttttcgttttatgtattcgtttataggttttttataagggtcgtattttatttttagagttatgaatatttgtttttttgggataggaattttggtgatgtgaaatttttttgatcgtacgtttatttataggttttttgtagggggaagtacgttacgcgttgttggtttattttggtagtttaatttggtattgtttttatataatattgtatgtaattttgtatttataataattaggagtattttattttttattttgtagtaatagttttagggggtttttttatatttttttttattttttttattgtgagtaaaaagtttgatttaagtaaaaggtagtaaatttaatgtaataattttagtgaagttataggtagtgtgaaatgttataaaggatgagggaaatataaatattatatatataatattataaatatataatatttaatatataaggattttatatatataattatattatatataattaatttataataattatatataattaatttataataattatatataattaatttataataattatatataattaatttataataattatatataattaatttataataattatataattaatataatataatatatttaatatttaatataatatatttaatatataattatattaatataatatataattatattatattaatttatattaatatataaataatatatataattatattatatataattaattatatatataatatttaatatataatatattaatataatatattaaaggattagaatgtgggtattaatagttattttaataatttttttttaatttttagagataatagaagttattggaatagaagtattttattataggaaggataatattgattgattgattgattgttttgttatattagttgttttgttaggaataaattgtagagggtaagggtaaaaattagaaaggttagttaagagattattgtaataattttagtgagagatggtgatttgattagaaaggtttattaattgattaattattgaagggaagttggagggaatggagaatggaaaagttttgaaacggtttgtatggagtaagtgcgtgatattggaaggaaagttattgataaggagagaatagagtaacggaaataaagataggaattattattaaaatatttgatgattgtatataggtaatttgtaaagaggaagagtaggaatataaagaatattaagagaatatttgttagaagtgttaaaaataggtaaaaattaattgattaattaattaatttttaaaaaaataaaaaataaattacgtttagagtgattattattttgggaaatttgtttattattattaaaattgatagatattggtggttattaatttagtttagttaggtttaattgttagaatgatatgatttttgttattgttgttagatttgtgggatattggagttaacgtaaaatggtttttaagtttattttgagaatatagaaagttattaaataaaaagaggagtaaagtttgtttttttttgaagattttttgagtgagttttataaaaatttttgaattttttgaaaatatattgaattatgttttgttttgtttttgaattgtttgaattttttgggatttgtaggaattgttaataagtttttaaatgtttttattgtattatattatttttagattaatttattttatttttgggtaatgtgttatatataaaatatttttgttttatgttttttttttaatttgtttttgcgtagtttgtaaattagtgaagttttttgttttttattagataggaataagaaagttaagaaattaagtttttaatataaagtgtaaggtttttttataaattttaagtttttttttgataagatgtttagtgagaagtgaaggttatatatagttgtttattgtataattgttatagttgtatatgattagtgtagaaatttaaaataagtaaaatttttggtatttgtaatgtagtttaattgtgtataattatgatattattatttttatgattttttaagatagggttttattttgttttttaggttgtagtgtagtggtatagttatggtttattatagttttgattttttaggtttaagttatttttttaaattagttggttaatttttaaaattggtttgtggaaatagagttttattatgttgtttagggtagtttgtaatttttgtgtttaagtatttttttgttttagtttttaaagtgttggaattttaggtgtgagttattgtgtttggtttatttttattatttttttttttttttttaaattaaatttttgggttaaaggtaaaatataatttaaaagtgttttttaataaaaattatggataatggaggtattttatattaggatatttgtaatatatttaagaatgtagttagaaaaagttttatagttttaaatttttttattaataaaaatataaattataaatgaatgaaatttttatgttaaataagataagaaaaataaatagaaaaaataaaggaataataaagtaaaaaataaataatatttgttttattaatttatttaaattgagaaatatataattattaaataaaaataatattttttggtaaaaaatttttaagagagattaattattagttattttaattgaggtatatgtataataaaaggataaggaggaagtaattattgatatgatatatgatgtatttaaaaaattttataatttttttgttatatatttgaaagatataatgataattttttatagaaatataatttgtttaaataggttttattatatgtaaaaaatttaaataagttaatttttttattaggaaaagaaaaatttattaagatatttttttaaaattaattattaagtttagatgattttaaggaagatttgtattaaaattttaaagtttggatagttttaatgattttgaaaatttttgtattttataaaaaagaaaattttaaaaaattaaggaaaatttaatattttttgtaaagtaagtatgatatttatatttaaatttaatatagttagaaaagaaaattatagataaatattagttattaatattgattgaaatgtaaaaatattagtaataatataatatattattaagaaattgatatattttgattaagtgtgatttattttgggaatatgatattgatataatattaggaaatttattgatataaaaattatatgaattttttggtttgatgatttgttaggaggatttatagttttatttatggttattatatattatagtaaaaggatgtaaagtatataagtaaagggaaaaggtatatgcggtaatgtttagtgaaaaataagtatgaaagtttttaggagttttttttttgtggaattatatgggttgtgtttaatttttttagtaat

SEQ ID NO: 115 - DNA, 12138 bp, Artificial Sequence
  chemically treated genomic DNA (Homo sapiens)
tttttttggttagtagacgtttaaatattttttttaggttttttttttgtttttgttgaggtttttaggtttttaggaaggtagaaggaggatttaggattggtagagagagtatttttatatttatttttttgtttgtagagtaggaggagtggtatttggaattgatttatggttttagtaattattagttttttaaagggttttaagtttttagattagtttgtgtgtgtgtatgtttagtgtgcggtggtatgtttttataatttagttttgtaaagaagttttttgcgatcggttcgtatataggttttttagtttggtaggttttattatttttatttttataataatttttatatttttaagtgttttgttagtatatttgattttttaaatagttttgtaagataaattgaattggtattatttttattaggttaaagttaaggattagtaagtttagatgatttgatttgtttaagattatataggagtttagattttttttgaattattgttttttaaaggttaatattttgtttttttatgtttttttatatttttcgttagtagagttttgaaagagattttattttttttgtcgtattatagattttggtttgaattttgtaatatttatttatgattttttttgaattttatgagatggttagaagaggtagtattttggttttttggggtgggtgaaggattatttgtaaggttgttttaatttttttatttttagtttgggttaggtttattgattgtatgtgttttgttttttggggtttggtttagattggataatattttaaggtgtgataggagtaagtggggaaggaaggtatggaaaatggtgattcggagtaggttgtaggttttgtgttagtttgagttttaggaaatatagttagttatgagaaggtagagattttattgaggatgtcgtttgtggaatttaagtttatggttgtattagtttagagttagagtatttattattggtggggtttaggtattggaaaattatttgttagatagatgatggtatgatgatatttgtttttgttttttatttgttttttttttttttattattttttttttttttgttttttttttttggtttttttttttatttgtttatttttttgtttttttttttttataattttatttttttttttttgttttttttttaatttatttttattttttttttttgtttttttttttattttatatttatggttgtttaatttttgtttatttttttttttttttttttttttatttgtttgtttattttattttttttttttgtcgttttatttttatttttttattttgtttttgttttttcgtgttgtttttttttttttttcgttttttttttattattttatttaatatatgtttttttttttttttttgttttatgttttgtagggatttgatttatttcgattcggagttttttttttatatgagtgatcgttagcgtgtggtttttaaatttttttagatgagtcgtgttgtagacgaggtttttaatgttatgatttttaatggtagttatcggttgatcgagggggtttatttagggtttttggtggagaaattgtttgatagttttgttttggttaagaaggtattattggcgttgaattatgggttggataaggtttatagtttgatggagttgagttttttagttttatttggtggttttttatatttggatttttttcgtttttatagttttagttttttagatttagatatattatttttagttggggatagtcgagttttgtaagttagtcgaaatatacgtattttttatttggttggtaagaaggttgtggttgaggaggataatggttttattggcgaggaaatagattttagtttaggtcggaagaagtttttttttaaaatttttaagaagttttttaagaagtaggtaggatggggtggtagtaaagggatagtttgtttttttttgggtgttttgtttttttttttttttttttttttaagataattggttttaagagtggggtatgggaagggttggtttaggggtttgggtattgtatatatttgtttttttatttttgggttttttattattatttattaattgattattatggtttgtttgttttgttttcgttttaattatgggttgttgttgttattttttttttattttagtgtatgttttagttgttgtttttttagtttttagttttatttttggggtttagtttttgtttttgttgttttagttttgaggtttggttttttgtttttgttttttgttttcgggttttttttttttattattttttaattttttttagtagttgtagggaagataggacgagtagtttttgatatgtgtgttttagatttgttttattttatttatagtggttttgtttgttttagattggggttagggtttaatttttgaagtttgttttttggtattgatgtgggttagaaggagttttattttaattttatttaggtttttagggatttatgggggagtgaaattaatttttagagaataatttattagagatttttaaagagaggttaggtttgggaatgggttgggagaggtatttgtttattggagtatgagtggatgttagaattgtaggttataaggtagttattttttttttttatttttatttatatttgttttttttttatttttgtttttttatattgtaggaggatttgtttttaagaggtgttgttttaaagttttttaagtattaatatttttagggtttaggataagtggtttttttggttaggagagttatagttatgatatagggtttttatggagttttggagttgttgggtaaggatgttgttattttttgaattaaaagataaataggttaaaaggaaaaaaagtaatttgaattttttaagtgtttacgttgtatattttttttgttagattttatttttatgttattttgtagttttggttagaggtttaaaaaggatataattagtttggggaaggggtggttaaggaagatggtataggtgaaggcggttgtgtgattatttttttttattttttttattttttagataatttttttttttatttgtttttgttatggttgtaaaggtattttttttttgttttattttttgttatatttttattttgggattttattttgggtttggggtgggtatatttggggttggttttaggagggtgttaggttgtagattgttttgtattttttggatatttttaaatggggttttttgtgttattttataaaattttttgaagtttaataaagtatgtaggagattttaattattgttggttttgatttttattgtgttttttgtgttgtggtatgatgggataaagagataattttttttttgtttagggaaaatgaaatttgaatgtatatgtttagaagttttgtgggtagggttattagataaatgtaggatgattagttaaatgtgaattttagataaatagtttttaaagtataatttttttttatgtagtatttgggatatatttttatttgttaaattgggaaattttatgtttgggtaaatttgattttatttattttataattttatttacgatttttaaaaaatatatttatttaatttttttttttttttttttgttttttttgagacggcgttttatttttttgtttaggttagggtgtaatggcgcgattttggtttattgtaatttttgtttttagcgtttaagcgatttttttgttttagttttttgagtagttgggattataggcgcgtgttattatgtttggttattttttgtatttttagtagcgggggggttttattacgttggttaggttggtttcgaatttttgatttcgtgatttgttcgttttggttttttatagtgttgggattataggagtgaagtatcgcgttggtttattttttttattttttgtagaaatggggttttattatgttgtttaggtttattttaatatttggttttatatgatgttttcgttttagttttttaaaatgttgtaattataggtttatttacgattttttatgatttttgaaattattttatagggagtttgggtagtttttggagggtagtgagaaattaacgaaaaggttttagggaaaagatgttatagatgaaattttataaagatcgttttgggtgtagtttaaattagaagtttttatattagttttatatattacggtttttatttatttttattttttattttaagttattaagtttattttatttttataaggtaaatattttgtttttgttattatttattgaagaattttaaaagtaaatgggtattgattttgttttgtttaaaatttttttagggttttgatttgcgttaggataaaatttaaacgttatcggttttgcgcggtttttttttagttttagagtgttagttttttggtcgatttaaaagttttggggttttaagttgtttacggttgtggagtttgggttggagtttatagcggacggtagtgttaggattattataataaatgttagagtaagaaaaacgttttcgtcggttaggttttgttattttaaaaataaattaatcgtttttttttcggcggagacgcgtaggtgagagggcggcgtttgatttagcgggttttaggtgttacgttagggtttcgagggtttcgaattcggtttgtttatataaaatatggtagtaggagagtagtattttcgtcgggtatgtttatatttaatggggtttatgggagaggcgtagttttttgggttttgtttagatttaatatggcggttatacgtcgtttgttagtttgtgaagtttatttcgggcgtgggtcgtagcgtcgagtaacgttattcgaatttcgtcgcgtttttttgtgcgttacgggtggcgggcgcgggaaggggatttggattgttgcgtttttgttttgaagaaagtgttgtttggttttaattttagtttttttttttgagtagcgtttggaatttaattttttttattttgttattttttcgatttcgtcggcgttttagagtcgtagtttagttttggattttttagagttttagttattagttgcgatgtatgtgattaagtaaggtaaggggggataaggtgggcgagaaggaaggttaagggatgcgggttgtcgtcgtcggagttgatgtttagttcgttcgtcgttttcgttgtttttcgtttttttcgtatttttcgtcgcggtttttcgttttgttagttcgttcggttttttgtttttagttagtttgtttcgaatttttttcgggtttttaggttgcgttttttcggttttgttattttgtcgttttttaaaaggataatatttatttcgtatcgagtagtgattgcgtacgtcgagtatttgttaggtattattttatttttttttgtaagtttttgagagatgattagtttattatagatgaggaaattgatttaaagttatttataggtgataatatagtttgatttgaaaatcgtggggttggtgagttgttttaggtatagggtcggggggtagttaggaaagaaggagggggtttttttatttttcgtaggtatttgttagtttattgattttttttgtggggtgaggataggagtgtggcgtggaaaaaatagattttagatagatagtattttcgagtttttttttttttatgggaagagatgttgaattagagaagggtggttgagatattttttgataagatggggattgggaagagttaggaattcgtatttttttttaatagtttttttttattagatttgttaagtgttcgttttgtgtttagttttttgtttggttttgtgagattgtaggaggagatagtttttgttttgggaataggttttatcgggttggaaaaataagagtaatatatttttaataatcgtatgagatacgtatgaataagttttgagttgaatttatttgtttttgttaaagtaatataatgattttaaaattgtaggtatttagtaaatattggttaatcgattggttgtttttattttgttttttaggttgtgaatattttaaagatggagatttgtttgagatagagttttgttttgttatttaggatggaatgtagtggtgtaattatagtttattgtaattttgaagttttgggtttaagcgatgtttttgttttagttttttaagtagttgggattataggtatgtattattatgagtggttaatttttaaaaatttttggtagtaaaggagttttgttgtgttttttagtttggttttgaatttttggttttaaattatttttttttttttggttttttaaagtgttgggaatataagtaagatggagatttttttgtttacgtttagtataggatttgatatgaatagatttttaaagaatgaatgaaaatagttgtattaaaatgtaggatacgatgaatgttgtgaataagtaggtagttgatttggtttaattatagttaatgtttagattggtttaattatagagaagagttggaaaggtggatagtagtggttttttttgtttttggtattttgagaatattattttgtgaatttttttagtttatattttagttgattaaagagtaaaataatatagtgtatttttattgatttatttataagagtgagagttgagtatttatttttgtatttttatttttttatattattatttatttgtatttttttagagaaggagtttcgttatgttgtttaggtttgttttgaatttttgggtttaagtattttttttattttagttttttaaagtgtttggattatagtgttgggagttatcgtatttggtttgagtatttattttttaaatttttagatatgggagagatgttaggatggtttatgataagttagtaataaagatgaattgaaaatgtatggatttagatgattagaatgggtaaaatttaattttgtgttgaattttgaatttttagagtttatttttaaatattttcgtttaaaaagtgttattttggtttggcgtggtagggtatggtggtttacgtttgtaattttagtattttgggaggttgaggtgggtggattatttgaggtgtggagtttgagattagttgggttaatatggtggaatttcgtttttattaaaaatataaaagttagtcggacggtagtggtttgtatttgtaattttagttatttaggaggttgaggtaggagaatcgtttgagtttgggaggtagaggttgttgaaatcgtgttattgtattttagtttaggcgatagagtgatattttgttttaaaaaaaaaaaaaaaaaaaaaaattttaattgttagttataattagttttaaaaagtagagtttatttttttatttttttatagagtataatttgatttaaatggtttatgttgtaaattttgttattgtagtatttagtaagatttaatatataatatgtatttagatttgtttgtttttttttttttttatatttttatgtttttatattttaatgttttttaatatgtatagggtttttggttttttggattttttttgtatttttttatttttggtatgttagtggaatagtagattaatttttatagtttttgttaattttttttgaaatggggttttgttttgttatttaggttggagtgtagtggtgtgattttagtttattgtagtgtttgttttttgggtttaagagatttttttgttttagtttttttagtagttgggattatagatgtgtgttattacgtttggttagtttttgttatttttaataataagggtaattggaagttgattttgaagtatttattgaatatgttaatgttttgttaaatattgtgagggtagtaatggagaaggtagttttatttttaaagaatttaaaattgttagggatttaggaataatttatatgagaattattagatagaagagaatagtagatgagttttttttatttgttattttgagttattttttttaatgggagagtattattttttaaggagattatggttaaaaaaataaatattgagaattattgtagtaaatgataaagtagttaattgagttgtaaattgttttggaatttagtgtagtatttttaaaattttggattgtaatttatagtaaaaaataaaatattttatagatatgtgtatatatgtggatatatataaaatgatataaaagtttacgaaataatgtttttgaaagtagtttatttgtattttaattttttttttattttagattttttttttatttttgttttttttttttttttttttttttttttttttttttttttttttttttttttttttttttgttttttttttttttttttttttttttttttttttgtttttttttttttttttttttttttttttttttttttcgttttttttttttttttttttttttttttttttattttatttatagtttgttatattattttataattttgtggatatcgtgttgtttatcgggattgtagtgatgagtaggtagatatggttttagtttttaaagattttataattaattgagaaagatagataaataaagaagtaatatgataaaatatgataaatattttgataggtaaagtataggtagtagaggttatttatttagttatttataaagtatttatttagtatttttttgtgttaggaatcgttgtaggtattagagattttgtagtgaataaagttaaattatattttttattgagttgatattttggtgtgggtgggagtggtaagtgtatataagaaataagaagtaaatataataattagttaattttagatattgattaatgagatgatagtaaaataggattatgtgataaagatgaatgagaaaataattttggattgggtagttaggaaaggtttttttgagaagttaatatttgagttgaattttaaatagtattaagagttagtaatgtgagatttgtggtttgaatattttcggtagagggaattagaaagtttgtattttgtggaaaaggtacgtatttttggttttataggattagggaagtttttttgaagagagaagaatgaaagatagtttatagttaagaggaaattatattagtatgttagaggattttttaattttattttttattttttgagacggagttttgttatgttgtttaggttggagtgtagtggtgtgattttggtttattgtaatttttgttttttaggtttaggtaattttgttttagtttttcgagtagttgggattatagtatatttagttaatttttttttttttttttttgtatttttagtagagatggggttttattatattggttagattggtttcgaatttttgattttaggtgattcgtttgttttggttttttaaagtgttaggaatataggttgagttattatgttttgttggttagaggattttaaaagaggaaaaggttagtgtgagttaaaagtggttgaggtaggttttatggaggtgtgagatttggagggtgagtaggagttagatgtatggaaaggtggaagaggaatttttaggtagagtaaggtataagtaatgatgtggatatgggaatgggaagtttttttgggatttatattttatagggaatagttgaagagatttggggttaaattaagaaaggttttgtttgagagaagaggataatgtaggtagtgagaagtagggattagtgatgtgataaaattaatatttggtttgaaaaattaattaagtggaatgatagaatagagaattgtgtgttattggatttttagatttttagtttgttttttatttttaagtgtgagttaagataattattaatgtatttttttttttttgttagttttttgattgattttagaatttttggtagttgtagaattttttttttgttaagttgtttttttttttttattgtatgtataattgtagaacgttaatgttgttttgtagttatttgtttgtttagttatttaattgttagagtattgaggttttagttttagtgttagttagttaatttattttattttagagttaaatgttgtagatgtgagtttgatgagaaaattattataatggtgattagaaagagaggggttaatatattagtgtagaagaaaaagtaatttgttttagtgataatgggttaatagtgatgttttattgtttatttattttttattaaatgtttgagaatttgttttgttttaggtattaaatttgagaatatagatgtgaattagagggttaaataaatgtaaatatatttagtatgttttttattggttattttaggttgagtattttttatttaaaatgtttgggtttagaagtgtttcggattttggatttgttttagattttggaatattcgtattatatttattggttgggtatttttaattagaaaatttaaaatttgaaatggtttaaggaatattttttttgaatattgtgttggtattgaaaaagttttggattttggagtgttttggattttggaattttggattaaggatatttagtttatagttataatggattgtagggtataaaagagataaaaattaaattagtgtgagatattaatatttattgagtgtttattgtgtattatatattgtgatttttttttttttataggagtagttttattttataacgaggtatagttgtaattatgttaaagttgttataataaaagtattttttattttatttaattttattgttatagtaaattgattaggtaagtaaaatagatataataattaatttttttttataaatgaagatttgtgaaatgattgattgtgttttgtggtttgtttaaggttaaggttgtttggtggttggatatatttattatttttggtaagaataaataaaggtcggatgagttattatttgaggttaaattaagagtagtaagatttttttgtttagaaggataaagatataatttaagtttaaaattatgaaaaatattaggtaaaatatatagtatgttagatggggtaagtgtaatggagaaaaagtatagaaggggaagggggataagaagagtaagggttttatttggggtattgtaatttaaaatggaattattagggaaagttatattgagaaggtgatgatattgagtaaaagatttaaaggagatatatagtaagaaggttaagttgttaaggtataataggaaggaaggtgggagagttggaggtgaaattgggaagtgggtgtataggataagtggtataggattttgtggatttttttttttttttagttggagttttatttttgttgtttaggttggaatgtaatggcgtgattttagtttattgtaattttcgttttttgggtttaaataatttttttgttttagtttttcgaatagttgggattataggtttttgttattatgtttagttaattttttgtatttttagtagagacggggttttattatattgattaggttgatttcgaatttttgatttttagtgatttatttttttatttcgtttttttggttttttaaagtgttgggattataggtgtgagttattaggtttggtttgtggattgttataataattttgatttttattttggagattataagttattattaggagttttgaaggaggtaatgatatgattttgagtttaatttttaaagggtaattttggttgttatgtgggatgggggaaaaatttaggaaattattcgtaaacgtttgtttgtatagaatttatattttttgaaggtgatattagagaagataatttttttatgaattttttgagggggttttaattttttttgtgaaatagtattttatgttggttaatttatatgttaattatatttgattttttgatattgtagttttaataattgttaatatgaatttaataattgttgatatgatttgattttttaga

SEQ ID NO: 116 - DNA, 12138 bp, Artificial Sequence
  chemically treated genomic DNA (Homo sapiens)
tttaaagaattaaattatgttagtaattattaaatttatgttagtaattattaagattataatgttaaagaattaaatgtaattaatatgtaaattgattaatatgaagtgttattttatagaaaagattgaggtttttttaaaagatttatgaagagattgttttttttgatgttatttttaaagagtatgaattttatatagatagacgtttacggataattttttaaattttttttttattttatatggtagttaaaattattttttaaaagttaaatttagaattatattattattttttttaaaatttttaatagtggtttatgatttttagaataaaagttaaaattgttataataatttataggttaggtttagtggtttatatttgtaattttagtattttgggaggttaagggagcggggtgggggggtggattattggaggttaggagttcgagattagtttgattaatatggtgaaatttcgtttttattaaaaatataaaaaattagttgggtatggtggtaggggtttataattttagttattcgggaggttaaggtaggagaattgtttgaatttaggaggcggaggttgtagtgagttgagattacgttattgtattttagtttggataataagaatgaaattttaattaaaaaaaaaaaaaaatttatagaattttatattatttgttttgtgtatttattttttaattttatttttaatttttttatttttttttttattgtattttgataatttggtttttttgttatatattttttttaggttttttgtttaatgttattatttttttaatgtggttttttttgatgattttattttaaattgtaatgttttaaataggatttttgttttttttattttttttttttttttgtgttttttttttattgtatttattttatttgatatattatatattttatttaatattttttatgattttggatttagattatatttttgtttttttagataaaaaagttttattatttttagtttaattttaaatagtagtttattcgatttttatttatttttattaggaatagtgaatatatttaattattaaatagttttaattttagataagttataaaatataattagttattttatagatttttatttgtagaaaggggttaattattatatttattttatttgtttaattagtttattgtgataataaaattagataaggtaaaaagtgtttttgttgtaataattttggtatagttataattatatttcgttataaaataaagttgtttttatgggggaaaaaaaattatagtatgtgatatataataggtatttaataaatgttagtgttttatattgatttagtttttgttttttttgtgttttataatttattgtaattataggttgagtatttttaatttaaaattttaaaatttaaaatattttaaaatttaaaatttttttaatgttaatataatgtttaaagaaaatgttttttggattattttagattttggattttttgattagggatgtttaattagtaagtataatgcgaatattttaaaatttgaaataaatttaaaattcgaaatatttttgggtttaagtattttgaataagggatatttaatttgaagtaattaataagaaatatgttaaatatgtttatatttatttggttttttgatttatatttgtatttttaaatttagtgtttagaataaggtaagtttttaaatatttgatgaagaataaatgaataataagatattattattaatttattattattagaataagttgtttttttttttatattgatatgttagtttttttttttttgattattattgtgataatttttttattaggtttatatttgtagtatttaattttgaaatggggtaaattaattggttggtattgggattgaaattttagtgttttagtaattggataattaagtaggtaggtaattgtaaagtaatattagcgttttgtaattatatatgtagtgggggggggaaagtaatttagtaaaaagaaaattttataattgttagaagttttgaagttaattaggaaattgataaaaaaaaaaaagtgtattggtaattattttaatttatatttgaaaataggaggtagattaaagatttaaaggtttaatgatatatagttttttattttgttattttatttggttagttttttaagttagatgttgattttattatattattaatttttgttttttattgtttatattattttttttttttaagtaaagttttttttagtttggttttagatttttttaattgttttttgtgaaatataagttttaagagggttttttatttttatatttatattattgtttatattttattttgtttaaaggttttttttttatttttttatatatttaatttttatttattttttaaattttatatttttataaaatttgttttaattatttttaatttatattgattttttttttttttaaaattttttagttagtagggtatggtggtttagtttgtatttttagtattttgggaggttaaagtaggcggattatttgaggttaggagttcgagattagtttagttaatatggtgaaattttatttttattaaaaatataaaaaaaaaaaaaaaaaaattagttgggtatgttgtaattttagttattcgggaggttgaggtagaattgtttgaatttgggaagtagaggttgtagtaagttaagattatattattgtattttagtttgggtaatataataagatttcgttttaaaaaataaaaaataaaattaaaaaattttttagtatattagtgtgatttttttttggttataaattgttttttatttttttttttttaggaagatttttttaattttgtaagattaaggatgcgtgttttttttataggatataaattttttaattttttttgtcgagaatgtttaggttatagattttatattattagtttttaatattatttagggtttagtttaaatgttggttttttagagaagttttttttggttatttaatttaaggttatttttttatttatttttattatatgattttgttttattattattttattaattagtatttgaaattaattgattattatgtttattttttattttttatatatatttattatttttatttatattaagatgttaatttaatgagaaatgtaatttagttttgtttattgtagaatttttaatgtttataacggtttttagtataaagaggtgttgaataaatgttttatgaataattgaatgaatggtttttattgtttatattttatttattagagtatttattatattttattatattatttttttatttgtttattttttttaattgattgtaggatttttggaagttggaattatgtttgtttatttattattgtaatttcggtgaatagtacggtatttatagagttgtaaaataatatagtaggttgtgaatggaataggaaggaaggaaggaaggaaggaggaagggacggagggagggggagagggaggggagggagggaggagggtaggaaagaagggagggagaaaggaaggaaggaagtaaggagggagggaaggaagggagggaggaagaaagggaggaaggaagggagggagggaggtagggatagggaaagaatttggaataaaagaaagattagagtgtaaatggattgtttttaaagatattatttcgtaaatttttgtattattttatgtgtatttatatatatatatatgtttgtaaaatgttttgttttttattgtgagttataatttaaagttttgaaaatattatattaaattttaaaatagtttataatttagttagttattttgttatttattgtaatggtttttaatgtttatttttttaattataatttttttgaggaatgatatttttttattaggaaaaatagtttaagatagtagatgaaaaaaatttatttattatttttttttatttaataatttttatatggattgtttttaaatttttaataattttaagttttttgaagatagagttgttttttttattattgtttttatagtgtttagtaagatattagtatatttagtaggtattttaaagttaatttttagttgtttttgttattaaaaataataaaaattagttaggcgtggtggtatatatttgtagttttagttattgaggaggttgaggtaggagaattttttgaatttaggaggtagatattgtagtgagttgagattatattattgtattttagtttggatgatagagtaagattttattttaaagaaaattaataaaaattgtaggagttagtttgttattttattgatatgttaaaaataagggggtataaaaaaagtttagaaaattaaaaattttatgtatattaaaaaatattaaaatatagaaatatagaaatataaaaaaaaaaagaaataaataaatttaagtatatgttgtatattaagttttgttgaatgttataatggtagaatttatagtatgaattatttggattaaattgtgttttatgaaggaatgagaaaataagttttgttttttagagttagttatagttagtaattggggtttttttttttttttttttttttgagatagagtgttattttgtcgtttagattggagtgtaatggtacgattttagtaatttttgttttttaggtttaagcgatttttttgttttagttttttgagtagttgggattataggtgtaaattattatcgttcggttaatttttgtgtttttagtagagacggggttttattatgttggtttagttggttttaaattttatattttaaatgatttatttattttagttttttaaagtgttgggattataggcgtgagttattatgttttgttacgttaggttaaggtagtattttttaaacgaaagtatttagaagtagattttaaaagtttaaaatttaatatagggttgaattttatttattttggttatttaagtttatatatttttaatttatttttgttattgatttattatagattattttaatattttttttatatttaaagatttaaaaaatagatgtttaagttaggtgcggtggtttttagtattgtaatttaagtattttgggaggttgaagtgggaagaatgtttgagtttaggagtttaagataagtttgggtaatatagcgagattttttttttaaaaaaatataaataaataataatgtaaaaaaataaaaatataaaaatagatgtttagtttttatttttatgaatggattaataaaagtgtattatgttattttgttttttggttagttaaaatgtgagttaggaaaatttatagaatgatgtttttaagatattaaaaataagaaaggttattattgtttatttttttaatttttttttgtagttaaattaatttggatattggttgtagttaaattaaattaattatttgtttatttatagtatttatcgtgttttatattttgatataattatttttatttattttttaagaatttgtttatgttaggttttgtgttaaacgtgaatagaaaagtttttattttgtttgtatttttagtattttgggaagttaaggaagggaggatggtttgaggttaggaatttaaggttagattgggaaatatagtaagatttttttattattagaaatttttaaaaattagttatttatggtggtgtatgtttatagttttagttatttgagaggttgaggtaagagtatcgtttgagtttaggattttaaggttatagtaagttatgattatattattgtattttattttgggtgatagagtaagattttgttttaaataagtttttatttttgaaatgtttatagtttagaggataaaatagaaataattagtcgattaattagtatttattaagtgtttataattttgaaattattgtattgttttaataagggtaagtaggtttaatttaaaatttgtttatacgtattttatgcggttgttaaaagtatgttgtttttgtttttttaattcgatgaagtttgtttttaaggtagggattgtttttttttataattttataaagttaagtaaagggttgggtataaagcgggtatttggtaagtttaatgaaaaagaattgttgagaaagaatacgagtttttgattttttttagtttttattttgttagaagatgttttagttatttttttttgatttagtatttttttttatgaagggaaaggaattcgagggtgttgtttgtttgggatttgttttttttacgttatatttttatttttattttataaaagagattagtaaattgataagtgtttacggagggtagagaggtttttttttttttttttagttgtttttcgattttgtgtttaagatagtttattaattttacggtttttaaattaaattgtattgttatttatgggtgattttgggttagtttttttatttgtaataagttaattattttttagaggtttgtagggaggaataaaatagtgtttggtaagtgttcggcgtacgtagttattattcgatacggggtaagtgttatttttttgaaaggcggtaggatgataaagtcgagggggcgtagtttgaaggttcgaaggaggttcggggtaggttgattgaagatagaaggtcgagcgggttgatagggcggaaggtcgcggcgggaaatgcgggaaaggcgggaagtagcgaaggcggcgggcgggttgggtattagtttcggcggcggtagttcgtattttttaattttttttttcgtttattttgtttttttttattttgtttgattatatgtatcgtagttagtggttgaggttttgaaggatttaagattggattgcggttttaaagcgtcggcgggatcgagaaggtgatagagtgggaagggttaggttttaggcgttgtttaggggaaagaattggagttggagttagatagtattttttttagagtagaggcgtaataatttaaatttttttttcgcgttcgttattcgtgacgtataaaggggcgcgacggggttcgaatgacgttattcgacgttgcggtttacgttcggggtaggttttatagattgataggcgacgtgtagtcgttatgttgagtttgggtaagatttagaagattacgttttttttatgggttttattggatatggatatgttcggcggaaatgttgtttttttgttattatgttttgtgtgggtaagtcgagttcgggattttcggggttttggcgtagtatttagagttcgttgggttaggcgtcgtttttttatttgcgcgttttcgtcggaggaaaggcggttaatttatttttgaaataataaaatttaatcggcgggaacgttttttttgttttgatatttattataataattttaatattgtcgttcgttgtgggttttagtttaggttttatagtcgtgggtagtttggagttttagggtttttagatcggttagaggattgatattttggaattggaagaaaatcgcgtaaggtcgatggcgtttggattttattttgacgtaaattagagttttgagagaattttaagtagggtagggttagtatttatttgtttttagggttttttagtggatggtggtagagatagggtatttgttttgtggaggtaggatggatttggtgatttagagtggagaataagaatagatgagaatcgtaatatgtaaggttggtgtagaagtttttgatttgggttatatttaaagcgatttttatgaaattttatttgtggtattttttttttgaagttttttcgttggttttttattgttttttagaagttgtttaggttttttgtgaagtaattttaaaaattatggaaagtcgtaagtgagtttgtaattgtagtattttgggaggttaaggcgggagtattatgtgaggttaggtgttgagataagtttgggtaatatagtgagattttatttttataaaaaatagaaaaagtaggttagcgcggtgttttatttttgtaattttagtattatgggaggttaaggcgggtagattacgaggttaggagttcgagattagtttaattaacgtggtgaaattttttcgttgttaaaaatataaaaagtagttaggtatggtagtacgcgtttgtaattttagttatttaggaggttgaggtagaagaatcgtttgaacgttggaggtagaggttgtagtgagttaagatcgcgttattgtattttagtttaggtaagagagtgagacgtcgttttaaaaaaaataaaaaaaaagaaagaaaaattaaatagatatgttttttaaaagtcgtaagtgaagttataggatagatagggttaagtttatttagatatagggttttttaatttagtaaataaaaatgtgttttagatattgtatgagagaaaattatattttaaaaattgtttatttgaaatttatatttaattggttattttgtatttatttggtaattttgtttatagagtttttgggtatgtgtatttaagttttattttttttgggtaaaggaaagattgtttttttattttattatgttatagtatagagaatataatgagagttaaagttagtagtggttaaaattttttatatgttttattggattttaaagaattttatgaaataatatagaaaattttatttgagggtgtttagggagtataaggtagtttgtagtttagtatttttttaagattagttttaggtatatttattttaggtttaaaataggattttaggataaaggtatggtagggagtggggtagaggaaaaatatttttatagttatagtaaaaataggtaagggagagagttgtttagagggtgggaagggtgggggaaagtggttatatagtcgtttttatttatattattttttttagttattttttttttaaattggttgtgttttttttgagtttttggttaaggttataaagtaatatgaaaatgggatttaataaggggaatatgtagcgtaggtatttgggaaatttagattattttttttttttttaatttgtttgttttttggtttaaaaaatgatagtatttttgtttaataattttagggttttataagagttttgtattatggttgtggtttttttggttaggggagttatttgttttgagttttaggagtattgatgtttggggagttttggggtagtattttttagagataaatttttttgtagtgtgggggagtaggggtaagagggaggtaggtgtgggtgggagtagagagaaaaagtgattgttttataatttatagttttggtatttatttatgttttaatgaatagatgttttttttaatttatttttaagtttggtttttttttaaaagtttttggtgggttgttttttgagaattggttttatttttttatggatttttggaggtttgagtgagattaggatgaggttttttttgatttatattaatattaaagaataaattttaaagattaggttttagttttagtttggagtaaatagaattattgtgagtggggtggaatagatttgaggtatatatgttagaagttattcgttttattttttttgtaattgttaggggaagttggggagtggtgggagggaggagttcgaaagtaagagatagaaataagaaattaaattttaaaattgggatagtagagatagaagttgaattttagaggtggagttgggagttgagggaatagtaattaagatatgtattgaagtggagagggagtgatagtagtagtttatggttgggacggaggtagggtaggtaggttatggtggttagttaataaataataatgaaggatttaaggatgagggggtaggtatgtatagtgtttagatttttggattagttttttttatgttttatttttggggttagttattttgaaggaagggagggaaggagagatagaatatttagggaaggataagttgtttttttattgttattttattttgtttattttttaagaggttttttaaagattttgaggggaaatttttttcggtttgggttggagtttgttttttcgttaatagagttattattttttttagttatagtttttttgttagttaggtggggaatgcgtgtgtttcggttggtttgtagggttcggttgtttttaattggagatggtgtgtttgggtttggggagttggggttgtgagaacgggaagaatttaaatgtggagagttattaggtggggttgaggggtttagttttattaggttgtgggttttgtttagtttatggtttagcgttagtaatgtttttttggttagggtagggttgttaggtagtttttttattagagattttgggtggattttttcgattagtcggtggttgttattggaagttatggtattgagagtttcgtttgtagtacggtttatttgaggaggtttgggggttatacgttggcggttatttatgtggagggaggatttcgaatcggaatgggttaaatttttgtaagatatggggtagagaggaagaaagggatatatattggatgaggtgataggggaaaggcgaagaggagagagggataatacgagaagataaggatagggtaggaaaatggggatagagcggtaggagagagaaataggatgaataggtaggtgggaaggagagaggaaagaggaatagatagaagttgagtagttataagtataggataagagaggaggtaggaggagggaatgaggatagattggaaaagagataggaaaaggagagtagaattgtagaggaagaaaagtaaaaggataagtaggtagaaagaagggttaagagagaaagataagaaagggaaaagtgatagggagggaagaaatagataagaaataaaaataaatgttattatattattatttgtttggtaaatggttttttaatatttgggttttattagtggtgaatgttttggttttgaattggtgtagttataggtttaaattttataggcggtatttttaataaaatttttgtttttttatagttggttgtattttttgggatttaagttaatatagaatttatagtttgtttcgagttattattttttatgttttttttttttatttatttttgttatattttaggatattatttagtttgggttaggttttaaggaatagggtatatgtagttagtggatttgatttaggttggagatgagaaggttagaatagttttgtaaataattttttatttattttaaaaggttaggatgttgttttttttaattattttataggatttaaaggaggttatagataggtattgtagagtttaaattaaagtttgtggtgcggtaggaagggtggggttttttttagaattttgttgacggagaatgtagggaggtatagaaagataggatgttggtttttaaagagtagtggtttagaagaggtttggatttttgtgtgattttggataagttaagttatttaaatttgttagtttttaattttggtttaatgaagataatattaatttaatttattttataagattgtttggaggattaaatatgttggtaaagtatttggaaatgtagaaattattgtgggaatgaagatgatgaggtttgttaagttgaaaggtttatgtacgggtcggtcgtaagaggtttttttgtaaggttgagttatggagatatgttatcgtatattggatatgtatatatataggttagtttaggaatttgagattttttaaggagttggtggttgttaagattatgaattaattttagatgttattttttttgttttatagataaaaaggtagatatggaggtgttttttttgttaattttgaattttttttttgtttttttagaggtttgagaattttagtaaaagtagaggagagatttaagggaaatgtttaaacgtttgttagttaaagggg

SEQ ID NO: 117 - DNA, 7374 bp, Artificial Sequence
  chemically treated genomic DNA (Homo sapiens)
gatacgatttaaattttgatttaggataatttatttagtattgatgtggaattgatttatttttgaagaagggagagggaggaggagagaagatttttttgaaagtggtaagggtttgggagttgggattaggttttttagggttaataggagtgacggatggatggtttaaatttattatagataggaaaattaatattttttaaattttttttttttttattttgaggatttattttttatagtgtttttaaatttaaagtgaattttgtttatattaatttaataaaggaagataaaaaagttgttttaataaaagttgttttttatgaggaatattatagatgtaagtaaagttttagagtagttattagtttttttgtttttgtttttgtttttttttttgtttttttgagatggagttttgttgtgtcgtttaggttggattgtaatggcgtaattttagtttattgtaagtttcgttttttaggtttacgttatttttttgttttagttttttgaatagttgggattataggtattcgttattacgtttagttaatttttttgtatttttagtagagacggggttttatcgtgttagttaggatggttttaattttttgattttgtgatttattcgtttcggttttttaaagtgttgggattataggtatgagttattgcgtttggttttgtttttgttttttttttggatggagtttttgtttttgttgtttagggtggagtgtagtggtgtaatttcggtttattgtaatttttgttttttaggtttaagtgatttttttgttttagttttttgagtagtttggattataggtacgtattattatttttagttaattttttagtatttttagtagagatagggttttattatgttggttaggttggtttcgaatttttgattttagatgatttattcgttttggttttttaaagtgttgggattataggtgtgagttatcgcgtttggtttagttattagttttttagtgtgttttgaaatgttatttatattgttttatgaaagagatagttttttttgtttttattttaatgcgtttaaagttttgtgttttttgattttagattttatgtttgttttttatttggttattatattagtaagtatttattttataaagttgtatgaaattaggattgagatttatattttgtagatttagattttaggattgagatttatattataatttttttttagcggttagggtgaaggattatttaagtttggatatttttgttgttttgggggttagtttagtgtagaattggtttttgagtattaggttttttttaggttttatttgtttaaggaatatttgttttaatatgtttaatatattttttttttttttttttgaggtagggttttattttgttgtttagattgtatagtttattgtagtttttattttttgggtttaagtgatttttttattttagttttttaagtagttgggtttataggtatttgttattattacgtttagttaatttttttttttttttttttttttgtagagaaggggttttattgtgttgtttaggttggttttaaatatttaggtttaagtgatttttttattttaattttttaaaatgttgggattatagatgtgagttattgtgtttaggttaatatatttgtagatttttaagattcggttgaattttaattgtaatttttaaaaatatatatggttagggtcgggcgagttggtttatatttgtaattttagtatttttttttttttggagatggggttttttttttgttatttaggttagagtgtaattgtttacggtaattttcgttttttgggtttaaacgatttttttgttttagtttttttagtagttgggattataggttttcgtttttacgtttagttaatttttgtatttttaatagagatagggttttattatattggttaggttggtttcgaattcgtgattttaggtgatttgttcgttttagttttttaaagtgttgggattataggtatgagttattgcgtttagttaattttagaattttggaaggttgaggtggggggattacgagattaagagatcgtcgggcgcggtggtttacgtttgtaattttagtattttgggatgttaaggcgggatgattacgaggttaggagatggagattacggtgaaatttcgtttttattaaaaatataaaaaattagtcgggtacggtggtaagcgtttgtagtcgtagttattcgggaggttaaggtaagagaatggcgtgaattcgggaggtggagtttgtagtaagtcgagatcgcgttattgtattttagtttgggtaatagagtaagattttgtttaaaaaaaaaaaaaaaaaagagagattaagagattaagattattttggtgtacgattgggttaggcggttaggtttggttgtatgtaatttgtttgtatgtaacgttcgatatgtaatttaaaatatttttttgataaatataattttgttgttttggtggggttatatatttttttaatttgtaaatttaaaatatataatatgttttaaagatttagtataaaaaagtaaattattaatttttatattgaatgtatgttgaaatgataatgttttggatatattgggttaaataaaataattatgaaaaaaatttattttgttttttttaaaatttttagtgtggttattagaaattataatgtgatatgtttatattatatttttattggatagtattgttttttgggatatttttttttttttagatattaaatttagttgttgtggtgattaaaggggtttttggtttagtattttttggaaggtaatggtgagatgggggaggggagttgttattaaattagattttaataatattttcgttaaagtaaaggaagtaatagtaatttagttttttcgggtttagtagtattaatttgaattttaggtttttaattaaaattttaaaggaagatatattttttttaatttattattgggaaaaagtttatttttttattaagcgttttttatttattttgttatttttagtattgaaagggttgtaagttataaatgaatgggtattaggaatttgatagttgatattttttttttaaaaaagtttagatattattttttatttatttagttgtttaaatataaattaagttgttttgttttgtttatttttaatttggaattattttttttttttttcgattattttttttttagtttttatttttattttttttttttgtttagtttgtttagtttttttgtatagtttagtaattagatatttatgtaatattttttttttaagaaatttatagtttataattaataggatattaataattttttttagttatgtgagaattatttgttttagtttttttttatattttataaaaagggaagaagggaaatattataaatgatttgtgggttagaatttttttgttttattatttttttttttttttttttttgagacggatttttgttttgtcgtttaggttggagtgtagtggcgttgttttggtttattgtaagtttcgtttgtcgcgtttacgttatttttttgttttagtttttcgagtagttgggattgtaggcgttcgttattatgttcggttaattttttttttttttttttttttttttgtatttttagtagagaatggttttatcgtgttagttaggatggttttgattttttgatttcgtgattcgtttatttcggttttttaaagtgttgggattataggcgtgagttatcgcgttcggtttttttttttattatttattgaagaattattagttttttggagagtatttgatatatagcgtgtattcggtaaatatttgtttaattgaattcggtatttattgtatttttagatgttataagtttgagattagtagaaagtgatgtagaatttagaatgggtgatatggtaaatgttttattaaatatagggttcggcgcggtggtttatatttgtaattttagtattttgggaggttaaggcgggtagattataaggttaggagtttgagattagtttggttaatatggtgaaatttcgtttttattaaaaatataaaaattagcggggcgtggtggcgggcgtttatagttttagttattcgggaggttgaggtaggagaattgtttgaattcgggaggcggaggttgtagtgagtcgagatcgtattattgtattttagtttgggcgatagagagagattttatattaaaaaaaaaaaaaaaaaaaaaaaaaggatatggattgtattttataaatagttgaattttttatttttattgttttgatagttggtttggtttttagaaatttagatttttttttttttaggtgagattatgcgaagaaaggaatattggtaaaattatttttttgattttttttttttaggttgttttttttttttttttaagattgtgtatttcgttttaaaaaaaaaagaaaaaaaaaagattgtagatttagtttataaatttataggattaagaatttttattaatattttttttaataattttaaatttttgatagtagtatttatttgatttcgttttgtatggatagatttattttaatttttttgtagattgttttaattttaagtagatgcgagagtataaaatagtgtatttgttttttttttaggtttttttggtagtattttgtttgtgaaattaagaggttttagttgttattagaagagggaaggagtaaggatgagtttttgaaaaaaaaaaaaaaaaaaaaatttagggtggagagagtggaaggatgtggttttaagagaggggggagggagggcgttattgtttgtggggcgggggcgggggtagttttgataatatagaatttcgagagattataagattgttttaggggggtggggtggggtggggtggggttgggggtttgtcgtttttttaggttttattttttgcggagattataaatagttatgattttagcgagatttagagatgttgtaatggtaagattttggattttttttgaggacgtggagaaaatttgttgttgagaaggatattttgaaggttttgttggttgaaaaagttgtttttggaattatttttagattttttttgaagatttgaattagattatagcgatggggatatagaaggtaagaatgatataattattggttatttttgtttgtttgggatatatttagaaaggtaaatattaatggtaatttttttgttttatttttttttaagttattaagttattttaaggtttttttatttcgtttttagtttgtattgttgtcgttttattagttttttttgaatgttatatagttttgtttattttattataggaaagttattcggagaagttgtgtttgttttttaggtttattttaggtaattatatgttattgaggacgagatggttgagtgtttagaggatcgggttgtttggttgtatggattataagtgtgggttttagagttagtgtgaagatttttttggaagtattagattttgaaaaggtttgtgtttggaggtataggttagggtttggttatttgtttgttttataatatatggggttcgtggatgttaaggagaaagaattttagttgttttttttattagggttaaaatcgtgagtgtaggatatattaaaatattgagtgttgtatatgtattatttgtagggagaaaggttttttttttttttttgattgagttttatttttgttgtttaggttggagtgtaatggagcgatcgtagtttattatagttttcgtttttcgggtttaagcgatttttttgttttagttttttgagtagttgagattataggtatgaattatcgggttcggttaattttgtatttttagtagagacggggtttttttatgttggttaggttggtttcgattttcgattttaggcgattcgtcggtttcggttttttaaggtgttgagattataggtatgagttattgcgcgtagtaagaaaggtattttttattaagataaatttaattaaaaataaggggttaggtgtggtgggttatatttataattttagtatttgggaaattaaggtaggaggattatatgaggtttggagtttgagattagttttgggtaatatagtgagattttatttttataaagtagaaagaaagaaaatgtaggaaaataagaaagggatggaaaattatgagattaaagaagaaaaggtttttaaagatagtgaatgatgagaggagatagaagagatttttattaaacggaaaaagatttaatagagtattgtattggtagggtttttcggggtatcgatgtttagttgggattgagatatttgggaggttgtaggtaaggttattttttttgttgaagtttttagtttgttgtttaatttgttcgatttgaaaggaaaggagtttaagatatgaaaggttgaagggattttgggtggtggggtgggggggaatggcgtagaagttggttttaggtataaaaattgagttgttttaaggtagaaatggaaaatgtttcgttcggttgaattattttaggtaaggtgaagatgatcggttttttttattaagaaatgttttttatatgttgggttcgtttttatatgttgggtttagagtaagtattttttttttttgcgcgggagttagggatagtagaattgtatttaataaacgaagattgaaatggggttaggatgtagtgagtagatttagtaggttatatggttttgagagataagagatttaaagagttatttagtagtgaagatataaattattattttttttattattattagtgggttttcgtggagtttggggtatagattagattgtattgtatttgtttttagaatggttaatttttagtaattttattcgagattgtttttttttttgtttttttagttcgtgagtggaattttatgtttatatttgtttgatgtaagtttttaaatatttttaaattgattaatttagttttttttaattttttttttttttaatttttttttatttttattaagttaattttatatttttatttttagataagttttttagtataatttatttttttgttttttttattaattatttaaattttattggatgttttttttatattatttataatttaaatttttttaatatagttttataattaataagaaatagttattaattataagttttaaggattatttttttttttgttttttttttttttagg

SEQ ID NO: 118 - DNA, 7374 bp, Artificial Sequence
  chemically treated genomic DNA (Homo sapiens)
tttggagggagggaagatagaggagagaatagtttttaaaatttgtgattgatgattgttttttattaattatggagttgtattaggagaatttgagttatgagtggtatgaaaagaatatttaatgagatttaggtaattaatggggaagataaaggaatagattatattaaagaatttatttggagataagaatgtgaagttaatttggtaaaaatgaaagaaaattggggaaggaagaagttaagagaaattgggttggttagtttggaaatatttaaaaatttgtattaggtaaatgtaggtatagaattttatttacgaattgggagggtagagaaaaagatagtttcgggtaggattattaagaattgattattttggaaataaatatagtgtagtttgatttgtattttagattttacggaagtttattggtggtggtggagggggtggtagtttgtgtttttattgttgggtggttttttgagttttttattttttaggattatgtaatttattggatttatttattgtattttggttttattttagttttcgtttattaaatatagttttgttatttttaattttcgcgtaggggaagaaagtatttattttgaatttaatatataagggcgaatttaatatataagagatattttttagtggggagaatcggttatttttattttgtttggaataatttagtcgggcgagatattttttatttttattttggggtagtttaatttttatatttgaggttaatttttacgttatttttttttattttattatttaaaatttttttaattttttatattttaaatttttttttttttaggtcgggtagattaggtagtaggttgggagttttagtaggagaagtgattttgtttgtagttttttagatgttttagttttagttaagtatcggtatttcggagggttttgttagtgtaatgttttgttaaattttttttcgtttagtaaaaattttttttgtttttttttattatttattatttttgagagtttttttttttttagttttataattttttattttttttttatttttttatattttttttttttttgttttgtagagatgggattttattatattgtttaaggttagttttaaattttaggttttatgtgatttttttgttttggttttttaaatgttggggttataggtgtgatttattatatttggttttttatttttagttaaatttattttggtaaaaaatgttttttttgttgcgcgtagtggtttatgtttgtaattttagtattttgggaggtcgaggtcggcggatcgtttgaggtcgggagtcgagattagtttgattaatatagagaaatttcgtttttattaaaaatataaaattagtcgggttcggtggtttatgtttgtaattttagttatttaggaggttgaggtaggagaatcgtttgaattcgggaggcggaggttgtggtgagttgcggtcgttttattgtattttagtttgggtaataagagtaaaatttaattagaaaaaaaagaaaagtttttttttttgtaaataatgtatatataatatttaatattttagtatgttttgtatttacgattttaattttaataggaaggataattggaattttttttttttagtatttacgaattttatatgttataggataaatagatggttagattttggtttgtgtttttaaatatagatttttttaaggtttaatgtttttagagaagtttttatattggttttgagatttatatttgtaatttatataattaagtagttcgattttttaaatatttaattatttcgtttttagtggtatatggttatttaaaataaatttgagaagtaaatataattttttcgggtgatttttttatgataaggtgaatagaattgtatgatatttaaagagaattgatgaagcggtagtagtgtaggttagagacgaaatgaaaaggttttaagatagtttggtgatttaggagaaaatagaataaggagattattattaatatttgtttttttgagtgtattttaaataagtaaaaataattagtaattatattatttttattttttgtgtttttatcgttgtaatttaatttaagtttttaagaaagatttaggggtgattttagaaatagtttttttagttaataaaatttttaaaatgttttttttagtagtaagttttttttacgtttttaggaaggatttaaagttttattattatagtatttttgggtttcgttgggattatgattatttataattttcgtaaagggtggagtttgaaagggcgataagtttttagttttattttattttattttatttttttgaagtaattttgtgatttttcggaattttgtgttattagaattattttcgttttcgttttatagataataacgttttttttttttttttttttaaaattatatttttttattttttttattttgggttttttttttttttttttttttaaaagtttatttttatttttttttttttttaatagtagttagagttttttagttttatagataaaatattattagaaaagtttggagggagggtaaatatattattttatgttttcgtatttgtttgggattaaaataatttatagagagattagaataaatttatttatataaaacgaagttaagtgggtgttattattagagatttaaggttgttagaaagagtgttagtaagaatttttgattttatgaatttataggttgggtttataatttttttttttttttttttttttgagacggagtatataattttaaaggggagggaaagatagtttgagagaagaaaattagggaaataattttgttagtgttttttttttcgtataattttatttggagggaagaaaatttgaatttttaggagttagattaattattagggtagtaggaataagaggtttaattgtttatggaatataatttatattttttttttttttttttttttttttttgatatggagtttttttttgtcgtttaggttggagtgtagtggtgcgatttcggtttattgtaattttcgtttttcgggtttaagtaatttttttgttttagtttttcgagtagttgggattataggcgttcgttattacgtttcgttaatttttgtatttttagtaaagacggggttttattatattggttaggttggttttaaatttttgattttgtgatttgttcgttttggttttttaaagtgttgggattataagtgtgagttatcgcgtcgagttttatatttaataaggtatttgttatattatttattttgaattttgtattattttttgttagttttaagtttatagtatttagaaatgtaataaatatcgaatttaattaagtaggtatttgtcgaatatacgttatgtattaggtattttttaagaagttggtgattttttagtgaataatagaaaaaaaggtcgggcgcggtggtttacgtttgtaattttagtattttgggaggtcgaggtgggcggattacgaggttaggagattaagattattttggttaatacggtgaaattattttttattaaaaatataaaaaaaaaaaaaaaaaaaaaaaaaattagtcgggtatggtggcgggcgtttgtagttttagttattcgggaggttgagataggagaatggcgtgaacgcggtaggcggagtttgtagtgagttaagatagcgttattgtattttagtttgggcgatagagtaagaattcgttttaaaaaaaaaaaaaaaaaagaataataggataaaagagttttgatttataagttatttatagtgtttttttttttttttttttataaagtataaaaagggattagggtaagtaatttttatataattggaaaagattattaatattttattagttatggattgtgagttttttgaaagaaaagtgttatataagtatttgattattaagttatataagaaaattgaataagttaagtaggagaagaaaataggaatgagaattgagggagggataatcggggagagagaagagtggttttaggttgagagtaaataaagtaaaataatttggtttgtgtttaaatagttgggtaagtgagagatagtatttaggtttttttggaggaggaatattaattattaaatttttaatgtttatttatttgtagtttgtaatttttttagtattggaggtggtagggtgggtgaaggacgtttggtaaagagataaatttttttttagtggtgaattggagaaagtgtatttttttttagggttttggttgagggtttagaatttaaattgatattgttggattcgagaaaattagattattgttgttttttttgttttaacgaggatattgttaaaatttgatttgatgataattttttttttttattttattattgttttttaggaaatgttgagttagaggtttttttagttattatagtaattgaatttagtatttaaaggaaaaaggatattttaaagggtagtgttgtttaatagaaatataatatgagtatgttatattatggtttttagtagttatattaaaaattttaaaagaaataagataaattttttttataattattttatttaatttaatatatttaaaatattgttattttagtatgtatttaatataaaaattaatagtttatttttttgtattaagtttttgaaatatattgtatattttaaatttataaattaaagggatatgtagttttattaaaataataaagttgtgtttattaggaaaatattttaagttgtatatcgagcgttgtatgtaggtaaattgtatatagttaagtttggtcgtttagtttagtcgtatattagggtggttttgattttttgattttttttttttttttttttttttagatagagttttgttttgttgtttaggttggagtgtagtggcgcgatttcggtttattgtaagttttatttttcgggtttacgttatttttttgttttagtttttcgagtagttgcgattataggcgtttgttatcgtgttcggttaattttttgtatttttagtagagacggggttttatcgtggtttttattttttgatttcgtgattatttcgttttggtattttaaagtgttgggattataggcgtgagttatcgcgttcggcgattttttgatttcgtgatttttttattttagttttttaaagttttgggattggttgggcgtagtggtttatgtttgtaattttagtattttgggagattgaggcgggtagattatttgaggttacgagttcgagattagtttggttaatgtggtgaaattttgtttttattaaaaatataaaaattagttgggcgtggaggcgggagtttgtaattttagttattggggaggttgaggtaggagaatcgtttgaatttaggaggcggaggttgtcgtgggtaattgtattttagtttgggtgataagagggaaattttatttttaaaaaaaaaaaagtgttgggattataggtgtgagttagttcgttcggttttggttatatatatttttaaaggttataattggaatttagtcgagttttgagaatttataaatgtgttgatttgggtatagtggtttatatttataattttagtattttgggaggttgaggtggaaggattatttgaatttaggtgtttgagattagtttgggtaatatagtgagattttttttttataaaaaaaaaaaaaaaaaaaaaaattagttggacgtggtaatggtaggtgtttatagatttagttatttgggaggttgaggtgggaggattatttgagtttaggaggtagaagttgtagtgagttatgtagtttgggtaatagagtgagattttgttttaaaaaagaaaaaaaaaagtgtgttgagtatattgagataagtattttttgagtaagtgggatttaggaggaatttgatgtttaaaaattagttttgtattgggttggtttttaaagtaataggaatgtttaagtttagatagttttttattttggtcgttagagaagagttgtaatgtgaattttaattttggaatttaaatttgtagaatgtaaattttaattttagttttatgtagttttgtgggatgggtgtttgttagtatgataattaagtggaaaataaatataaaatttaaagttagggaatataaggttttaaacgtattgaggtaaagatagggaaaattgttttttttataaaataatgtaagtggtattttaagatatattaaaaagttagtaattggattaggcgcggtggtttatatttgtaattttagtattttgggaggttaaggcgggtggattatttgaggttaggagttcgagattagtttggttaatatggtgaaattttgtttttattaaaaatattaaaaaattagttgggagtggtggtgcgtgtttgtaatttaagttatttaggaggttgaggtaggagagttatttgaatttgggaagtagaggttgtagtgagtcgagattgtattattgtattttattttgggtaataagagtaaaaattttatttaaaaaaaaaataaaaataagattaggcgtagtggtttatgtttgtaattttagtattttgggaggtcgaggcgggtggattataaggttaggagattgagattattttggttaatacggtgaaatttcgtttttattaaaaatataaaaaaattagttgggcgtggtggcgggtgtttgtagttttagttatttaggaggttgaggtaggagaatggcgtgaatttgggaggcggagtttgtagtgagttgagattgcgttattgtaatttagtttgggcgatatagtaagattttattttaaaaaaataaaaagaaaaataaaaatagaaataaaagagttagtaattgttttaaaattttgtttgtatttgtaatattttttataaagaataatttttgttaaagtaatttttttatttttttttattaggttagtgtaggtagagtttattttgaatttgaaaatattgtagaaaataagtttttagggtgaagaaagaaagaatttgagaaatgttgatttttttgtttatagtgggtttaaattatttattcgttatttttgttggttttgaagggtttaattttagtttttaggtttttattatttttagaagggtttttttttttttttttttttttttttttaaaaatgaattaattttatattagtgttagatgaattattttaaattaaaatttgaatcgtatt

SEQ ID NO: 119 - DNA, 16258 bp, Artificial Sequence
  chemically treated genomic DNA (Homo sapiens)
aaaaaaaaaaaaaggtggtatatttatataatggaatattacggggtagtaaaaggaatgaagtattgtatatgttacgatgaattttggaaacgtgttaagttaaaaaagttagatataaaggttatagagtatatgagtttatttataggaaatgtgtagaataagtaaatttacggtagaagagtggttgttagggttgtcggggagaattgagggttaatagttgagggataaggatttttttttgggagtaatgataatgttgtagaattatataataatgatggttgtataaatttgtgaatatattattgaattgttcggttaagagggttaattttatggtatgtgaattatattttaattataaagtttgaaatttttaaagaaaaagttatgttttgtttagtattttattttttaaaaattatatttagttagttatggtttttaaaaaatagtatgtttattttaagaaaaggtggaaacgtcggtttttttaagttattattaatttgtgaatacgtcgggattacggttgaaggaatgaggattatattcgagagttgtttttgttgttagtggaaagaatgtttttgatttttacgtttttttatttataatatatatagaagttggttgaaaagagggaaagtaatattagttttaaaaatgttagtttttttttttataggattggatgtttagatatttggtaagagtaggggtgggtttggaggagcgtggagggataggtgttgggatttgatggtgtttgaggttgtgtttagtgatttagtggtttaggagcgtgatgtgagtacgtattcggggttttttaggatttttaggtatttatttaatagttttattagtgagaaacggttttagttgtaagtgatagaaaataaaatgaagtattttttttttttattaagttaagttggtggtggggagttgggatggtgttttatagggtaaggggttttagttttttttagtttggtgttttgttttgtggggttttaattttaaggtttaagttggtggtatttatattttaggaagtaggatggagaaataggtaaagttaagagagtaaagtttttggaagttgtttgttatatggtattttgtatatattgtattaagcggaattttatgtttgtattgattgtaagagtaatggggaaatgtttttattttgggtagtcgtaggttttgtttttaattttattattatagaagaggtattgattaaatggatttatggatggggaggagaagttattagtagtttgtataaaagaggttcgtggtaaaattttaaaattttagaatatttttagtagaggtgaggttagtagtgattgaagttttggtattattgtttggttatagaatagttcggagatgtgttagtttgttttgtggtatggtgttaatttaatattttgttttggttaaattttttttatataaaatatttgttttttattttgatttagaaaagtaatttttatttttgttttattttttttttttggagataagagtttcgttttgttatttaggttgaagtgtagtagtgcgattttagtttattgtaattttcgttttttgggtttaagcgatttttttattttagttttttaagtagttggaattataggcgtatattattacgatcggttaattttttttttttttttggtatttttagtagaaacggggttttattatgttggttaggttggtttcgaatttttgattttaagtgatttatttgttttagttttttaaagtgttgggtttataggttattacgtttggtttagttgtgttttattataatagtaatagaaacgtttttatttttttttttttattttattattaagtgattgttaattttttattttaaatattttttaagtgtatttatttttgttttttttatttttatgttggtttaagttatattgtttttttatttgggttacggtaaagattttttattgttttttttttttatttttaaatttagcggttttttgtttttttattagtttatttttggatatttagatggaattttaatttttaattttttttatttttagggatagggttttgttttgttatttaggttggagtgtagtggtatgatcgaatttttgggtttaagcgatttttttgttttaggtttgttaggattatttttttttttttagttttattttatcgttgttattttttttttttatttttgagttattaggttttttatagttttttatttcgttttgttcgcggagtttgtaggtttcggttttatggcggtttgaggtaggggtttggaggttggttcgttcgttacgaaggttggggggtttttggttagaagtaggattcgggcgaggttgagggggattttggtagaagttgaaggggattcgggtgaggttgagggggattcgggtaaaggcggaggggaattcgggttgaggttgggggggatttgggttgaggtagagggggatcgaggttgagggggattcgggttgaggtagaggtcgagggggattcgggttgaggtagaggtcgagggggattcgggttgaggtagaggggttttgggtagggataggatttattcggagttcgtaggttcgttaggtagagggattggttgagcggttcgtagtttggcgttatgacggtttttcgttacgttttcgttttcgcgttcggttttttttagggcggaagtacgggtcgagcgttggtgacgttatggttgtgtttgcgacgttttgttattggtaggaatcgggtattgcggttcgtagttttcgggatgattttttttgggtttgagggtttggtttattgttttcgttttttcgggttgggtcgttaaggcggggattgggagtgttcgcgttttttttagcgattttcggttttagttattttttcgtttaaaggtagggagaagtggaagatttgggtttagatagaagtaggtgttatgtatttgatatgattgatgattataaattttggacgattatttttggggggaggatgggggacggagatgagtttcgttttgtcgtttaggttggagtgtagtggtgtgatttaggtgcgttgtaattttcgtttttcgggttttagttatttttttgttttagttttttaagtagttgggattataggcgtttgttattatgtttggttaatttttgtattttcggtaaagatagggttttattatgttggttagattggtttcgaatttttgattttaggtgatttatttattttggtttttttaggtgttgggattataggcgtgagttatcgcgttcggtcggatttttttttgtgttggattgtatatttgtattcgtttttttatttttttatcgttgattttttttttttattttatttttgtaattaaagtgtattttttttggaaattttttttagatttttgaaataattggaaatttttggttttgttatgcgttagttataagttagtgtgttaggatagtgatacgtagaagaaaaagataggtagtagttggtgaaagggaatgttgagtttttttttgtgaatagggattttttcgattttttaatatatatatatatatagacggttacgttgttaggttttttatagttttttattttgagtaattttggggatttgttgttaatgtaaggaatagtgtttaatataggtttttagtttttgtttgtttaaagatgtatgagatttagaattaattattaaagtaattggatttacgttatagtaaatagaattgggagtatgttttgtaaagatgaaaatttgtgggatttgtgagattttggattttggttatttgcgttggtgtgttttgtggtagttgaatgagtgttaaatatggggggttgatagtggtttggttttgagatggtcggattcggattagtaggtgtgatttattttttttgttttgtttggaaaggggttcgaggtatttattatttttttagtagtgatgaatatatagaaagtaatatttttaggttattttgagttttttaaaatggaaaataagaggtcggatacgatggtttacgtttgtaattttagtattttgggaggttaaggagggtggattatttgaggttaggagttcgagattagtttggttaatatggtaaaatttcgtgtttattaaaaatataaaaattagtcgagcgtggtagtgtacgtttgtaattttagttatttaggaggtggaagtaggagaatcgtttgaattcgggaggcggaggttgtagtgagttgagattatgttattgtattttagtttgggataagagcgaaatttcgttttaaaaaaaaaaaaaaaaaaaaaaaaaaatagaaaatgagaaattttttttaaatagtattatacggtgatttgggtaaaattgattttttattaagagatatttgattgtagtttttttggtagggagagtatttttgaggtttttagtggtttaatttgttgtttttagattatttggtgttatgtagggtggaggatagttgttgtttgttatgcgtttttgatagaaataatttttttagttatttattatgagtttgattggtagagattttagtaatggggaaatatcgtagattgttttattaggataatgttgggtttgtagtttttagggggtatttatttatttagttaaattttagacgttttatttaaaagtagaagtgaaaggaagattaggtttttgaaagggttattttgatttaatttggttataaaaatgttattggttgttatttggtatggttaaagtgtatttagaatgttttttttttttatttagtgtacgcgttattttggttaaaaggaggtgagcggtattttgtttttttagagtaagtatggagtaataggattagagtatgaaggaaggggtgagtgtgttgtttagggaaaggggttaagagtaggtttggttgttagggtttgtgtagtttttttggagagtcgttggggggtttttggtgttgtagagggaattttgtgttgggagggattatggtggggagagggggaaagttttgtttagtaggtggttttttatagggaggagagaggtttagagataagtgttttgtggaaattattttattggaatagtttttaatagtaggatttgtaattgaatggaagagatttaaaggatttatttgttttaatttgaattaaatatgttagttgtaaaatttttttatggttggtgagatgtttcgttttgttttcgttttgtttttggttttagggtagttaatttttttagtaagtaatatagttgagttgtatgaaagtaagataaatttagaaaaggcgttgtttgatttgaatttagtttagatttgttacgtaggttttttgttttttagattttgaggtttttttgttttagagaggaaagatttttatggatttttgtaacgtaattgtagtttattttttagatttttttgattgaggaaaatgtataatgttagaaaagtaatattgatttattaatattttataagaatttgtatttatttattataatagtatttgtttatatttggagtggaggaaggatagtgtatatttttgtaaaatagtatttgtttaggtatggatgtgagatttttattataggtagattggaaatatgttttgtagtatatagattaagagtgggttttgggaggttgaggtgggtggattatttgaggttagtagttcgagattagtttggttaatatggtgaaattttatttttattaaaaatataaaaattagttaggcgtggtggtaggtgtttgtaattttagttatttaggaggttgaggtaggagaattatttgaatttgggaaatagaggttgtaatgagttgagattacgttattgtattttagtttggttaataagagcgaaattttattttaaaaaaaaaaaaaaaaaaagagtgggtttgggaagtagaagtttttaggatttatttttgttttattttattttagttgtgggatttgggtaagttttttaattttttagtgttttagtttttttatttgtaaaatgggagtaataattatatcgttttatagggtgttggagtaattaaatgagataatgtatgtaaagtatttggtatagagtgagtttttcgtaaatgttattatttttttttttttttttttcgttttttttttttttttttttgatatagagttttgttttgttatttaggttgaagtatagtggtgcgattaaggtttattgtaatttttattttttgggtttaagcgatttttttattttagttttttaagtagttgggattataggtatgtattattatattcggttaatttttgtatttttagtagagatggggttttattatgttggttaggttggtttagaatttttgattttaggtgattcgttcgtttcggttttttaaagtgttggggttataggtgtgagttatcgcgttcggttatcgtaaatgttattattttttaattattttttaggttggtttttttattttcgcgtgatttttatttggtattggttaacgtttcgttgtaggggttgttttgtgtgttataagatgtttagtcgcgtttttggttttattttttagacgtagtagtttttttttttaggagtgataatcgatgttttcgagagggtagaatttatttttagtttttaattgagaggtattgttttggagtttatttagttttttcgtttgggttattttgtttgttttataattaagaaagtgttagataaattaagtgttattatttttattttatagaaaagaaacggaggtgatgaggatttaggtgtttggggtttagggaggtttttcgttgtttagagaaaggtataattgttacgttttttacgtttattaagtttagttgtagaaaggaatggaaatatttttacgtggtaggttttgaaattgagtaatatattgcgaaaggaaatgatttagatggttatatgcgagaggtatgggttgatttagttgtttgttgttttagttttttagggaaggaagttttttttgggttagagggatgaaggtggggatgggtttttcgtttttgagagtagtttgttttttggggagaaagttggggcgtgttgggttttttaaaatattttgaaggaagcgattttaatggtttgtaagaattcgggaaattattaagtgtagtcgagaggggaggtaggagttaaggagaaatgcgggggtaggcgaaggttatagaggttgcgcggttcggggaggagggcgtttggtagtatggagttagttgtttgttttttagtggttgtgtggtagtggttttattggttttttttttttttttttttttttttttttttttttttttttttaattttgagatagggttttattttgttggttaggttagagtgtaatggtgggattatagtttatcgcggttttgaagttcggggttttagtaatttttttattttagtttttcgagtagttgggattataggtatgtagtattatttttggttaatttttaaatattttgaagagacggggttttattatatttaggttggttttgggttattgggtttaagtgtgttttttgttttagttttttaaagtgtttggattgtaggtttgagttattgtatttagttttgttttttttttatgtagagggtaaatattgatatttattagatgtgtattaaggattttttgttaggaagaaaagattgttggtttgaaagaaaaaaaaataaaatggattaggaaaagaaaaaggtataataaggtattttataattatataagaattgagggttaggtgtagtggttttggtttataattttattagtttgggaggtcgaggtaagcggattgtttgagtttataagtttgggattagtttgggtaatatggcgaaatttggtttttataaagtgtataaaaattagttgggtatggggatcgtgtttatagttttagttgttttagaggttgaggtgggaggatcgtttgagtttgggaggtagagtttgtagtgagtagagatagtgttattgcgttttagtttgcgtgattttagttagagtgagattttgttttaaaaaaaaaataaaggattgttgaataaagttttttattttaataaaaagatgtcgaagtgttttggaaaataaagatatatttttgtggagtggttttattagtaattagttgagtattttagagtaattgatatttttttgtgtttttcgggtttttattgatatttatttgtaattaatggattaattaatatatttgtaatatttattatagattaggtatggttttaagtgttttatattagtgaatttatttatttttgtggtggtattattatttttaaaaaaaaattttttttttgaggtagggtttggttttattatttaggtaggagtatagtggtataattacggtttattgtagtttttgggtttaagagatatttttgttttgtttttaaattttttcgtagagacgaggttttattatgttgtttaggttggttttaaatttttggtttaagttatttttttgtttcggttttttaaagtgttgggattataggtatggattatcgagttaggtttattatttttattttaaaggtgaaggaattgagaagtttagggagttcgttaaggttatatatgtttagtagagttaggtttcgagtttatatttttgggttttagaaattgtgttttaaattatcgtagcggttgacgatgtttatttttttttgttttttttattatttgtttgtgaaattgagtttaatagtgtgataaagtgatatagtttgaagtattgattttttatgagcgttaattatttcggggtgtttgtattttgattgtagatttttaataaggaaaagttttgaattgagagaatgtttttttgataatagaaattttaggatggatttttaagggagatggtttgggttttttttttagtgattttgaatcgtattttgttagaaggttagttttgaggattgttaatttaaaaaaagaaattgtagtaaaatgaatgtagagagtgtattggggttaaggttgaggattgtagttttgggaaatattgggaagtattttggagagtataggagaagtttaagtttttaaagaaaaaaggataaattaggagaggagtgattataaacggtgtttgttaggaatttttattggtttagagaaatgatattgatttagtgataggttatatatttttttttttttttttgagatagaattttgtttttgttgtttattttggagtgtaatggtgtaattttagtttattgtaatttttatttttcgggtttaagtaatttttttgttttagtttttcgagtagttgggattatagacgtgtgttattatgttcggttaatttttgtatttttagtagagacggggttttattatgttgtttaggttggttttgaatttttgatttcgtgatttgtttatttcggttttttattaaagtgttgggattataggtgtgagttatcgcgtttggtttatattgttgattgtagagtatgcgttgtggtgttcggtgtatggtattgttaggttaatttattgttatttggtggtaatatttagtgtagagtttatatagtaggtagatgatttagtttacgtgggaataagatgtgattgttgttgtattttagtgttttgttggttcggttatttaaaggggtatatattttttaaaaagtttttttttttttttggggtggtcgttattattaaagttttaaaatgttttttgtattatgaaagggaggaagttggtttattgatagtatgaggaatgtggtttttggttttttttgaagtatagtttagcgttttggtaatttttttagtttttaaggagagatttttcggttacggttgggggttattggggttttttattttaataagttggttagagattcgtatattttttttagttttttttttttttttatgttttaatttagtttagtattaaattttttttgtttttttttttggaaagtaaaaaaagaaagaaagatggtttaagttttttttttattatgtgttttttaaaatgtagtattgtatttttattgagaatatattttaatattatataattttatttttttaaagtatataggtttaggttggtattgtggtttatatttataaaattaatattttgggaggttgaggcgagaggattgtttgagattaggagtttaagattagtttgggtaatatagtaagattttgtttttataaaaaatgtaaataggtcgggcgcggtggtttacgtttgtaattttagtattttgggaggtcgaggcgggcggattacgaggttaggagatcgagattattttggttaatacggtgaaatttcgtttttattaaaaatataaaaaattagtcgggcgtggtagcgggcgtttgtagttttagttattcgggaggttgaggtaggagaatggcgtgaatttcgggaggcggagtttgtagtgagtcgagatcgcgttattgtattttagtttgggcgatagagcgaaagttcgttttaaaaaaaaaaaaaaaaaaaaaagtaaataatagtttgatgtgttggtttatatttgtaattttagtattttaggatttaaggtaggtggattatttgaggttaggagtttgagattagtttggttaatatggtgaaatttcgtttttattaaaaatataaaaattagttaggcgtggtggtatgtatttgtaattttagttattcgggaggttgaggtaggagaattgtttgaatcgaggaggtggaggttatagtgagttgagattgtgttattgtattttagtttgggcgatagagcgagattttgttttaaaataataataaaaaaaatttaaataaataaagtatataggttgggtatggtagtttatatttgtaatattagtattttgggaggttgaggtaggaggattgagattagtttgggtaataaagtgagattttgtttttatatatatatatataaagtatatattaatatataaaagtatataatttattattaaagtgaaataagttaggtacgggaagataaatattgtatgattttatatgtggaatttgaaaaagttgaattttttaagtcgaatttatagggtgagaagtggtgttttatgttgatttttatttgtatttgttttatgggatagtaagtttttttaatttgtatttttagtagtttttaaagttggtatttttaatttttatcgtggttcgttttattatttaagtgtttatttgttgtttgttggtttttgtagtaatttggttttttttttgttttgtacgtagtagttggagtaatttatttatttatttattttttttttgagatagagttttgttttgttttttagattggagtgtaatggcgtgatttcggtttattgtaatttttattttttaggtttaagcgatttttttgttttagtttttttattagttgggattataggtatatgttattacgtttggtttatttttgtatttttagtatagatggggttttattatgttgtttaagttggttttaaatttttggttttaagtgattttttcgttttggttttttaaattgttgggattataggcgtgagttattgtgtttagtttggagtaatttttttaaagtttaaatttttttattttattttttggttatagagtatatggagggaatagatggagtgaatatggagtgaatatttagttttttttgtggtttttatttcggtttgtttttttttttttatgttttagttatattggttaaattttagatgtttaaaggttttgagtttcgtttgttttaggtttttttatatgttgttttttttttttgaattattttttttttttttttttttttagttgaaatgttgttttttagatttttttttttaattatttttgtgtttttttttttagtatttattatagttatagtttattatatttttatgtagttttttaatgtgtgtttttattattgataatagtttgttgggggtagttgttttgtttattcgagggtattgtgttttttggagtttagttagttggttatgtatatttgtttaatgaagttggttggatcggtagggttagcgagaatttatttagaataattttgttatttttaggagagtgagttatgatttttattgcgtttatagaatgtgtttgtggtttgaatttagggaggtagtgaaagaatggagggtgaattgaatgttttatgtttagagattttatagtttgattatttagtcgttttgattttttttttatagtttttttgattatttttgttgggattttattaaagcggttagggagttggttttttatggtgtttggtagaatttttaattttggggtatgagttttgggaattagttagttttattagttgggttgtgtttgttggttgtgttgttggttagaattttatttttgattttaaaggattttaaattttagggtatttattagattgagggagtggttaagagttgtatttggttgtgtgaatgaagttggttgtattttcgttttattgagaagagaattggaaaagatttttttttttttttttgagatagggttttattttgtggtttaggttggagtgtagtggtataattatagtttattgtaattttgaatttttgggtttaagtgatttttttattttagtttcgtgagtagttgggattataggcgtgtgttattatatttagttaatttttaaattttttttgatagagataggatttttttatgttgtttaatttggttttaaattttagggtttaagtgatttttttattttatttagtttttcgaagtgttgggatttaagcgtttgttattatatttagatagaagggatttttttttttttttttttttttttttttgagatagggttttgtattgttatttaggttggagtgtagtggtgcgattttagtttattgtaatttttgcgtttcgtgtttaagtgatttttttattttagttttttgagtagttgggattataggtgtatattatgtttagtaaatttttgaatttttagtagagacgaggttttattatgttgttcgggttggttgagaatttttgggtttaagtagtttatttattttaattttttaaagtgttgggatttataggtatgagtcgtcgtgtttagaagagaattttttaattaatattttttttttttttttttatttttatttttttttttttgtttgtaataaaattaagtagtagaatagttataggggagggatttttgtttgttttgtttgtttatcgttatatttttaatatttagagtaatgtttgtttatattgggcgtttaatatgttgaatgattgaatggttgaatagacgagtgaatgaatgaatatatagagcgaattagatgggaggtgagttaagtttattgtgtgtgtatatgtgtgtgtggggggtgggttgtgtgtgtgtggggtgggttgtgtgtatgtggtgtgtgtgtggggtgtgtgtgtgtggggggtgtgtgggttgtatgtgtgtatgtgtggtgtgtgtggtgtgtgtatttttgtttatgtgtgtggggggtgggtgtgtatgtgtgtggtgtgtgtgtggggtatgtgtgtggtgtgtgtatgatgtgtgtgtggtgtatgtatgtgtgtatatgtgtgggggtggggtatgggtgtgtatgtgtggggtgtgtgtgggaggtgtgtgtgtgtattggaggtatgtgggggtgtggggtgtgtagtgtgtgtatatgtagggggtatgtgtgcgtgtgtgtatgtagtgtgtgtatatttggggggcgtgtgtgtttgtgtgtatgtagtgtgtgtatatgtgggggggcgtgtgtgtgtgtagtgtttgtgtatatgtggggagtgtgtgtgtagtgtgtgtattatggggggtgtgtgtattgtttgttatatgaggggcgtgtgtgtagtgtgtgtgtagtgtgtgtattgtgtatgtagtgtgtagtgtgtgtagtgtgtatgtagtgtgtgtgttgtgtgtgtgtatagtgtgtgtgtattgtgtgtgttgtgtgtgtagtgtgtgtgtgtagtgtgtgtattgtgtgtgtgtggtgtgtgtgtattgtatgtgtgtagtgtgtgtgtgtagtgtgtgtgtgtgtgtgtgtgtgtgtgtgtagtatgtttttgttttttattagggttttttgtaggtgttgttttttagaggtttattttattttatttggggttttatgataaggtaggaatgattattgtttttttttttttttggttttttatttattttttttaagatattttttttaggtcgggtatagtggtttatgtttataattttagtattttgggaggttgaggtaggaggatcgtttgagtttaggagtttgagattagtttggataatataatgagatttttgtttttataaaaatatattttttaattagttaggtatgatggtatgtatttgtagttttagttattcgggaggttgaggtgggaggattatttgagtttaggaggttgaggttatagtgagttataatagtattatagtattttagttagggtaagaaatgttttagaaaaaaaaaaaaaaaaaaaaaaaaaagattttttgtagatttagatatcgtgggatagtgtttgttttgttattggagggttaagtatgaatttgtgttatttgtgaaagggggttttttggttaggcgtggttgtacgtttgtaattttagtattttgggaggttaaggtaggtagattacgaggttaggagattgagattattttggttaatatagtgaaatttcgtttttattaaaaaatataaaaaattagttaggcgtggtggcgggtgtttgtagttttagttatttgggaggttaaggtaggagaatggcgtgaatttaggaggcggagtttgtagtgagtcgagattgcgttattgtattttagtttgggtaatagagagagatttcgttttaaaaaaaaaaaaaaaaaaaaaaaaaaaagaaaggcggttgtttattagagtagatggaagaaggttttttgatggtaagttagagagtagcgttttaagttttttttaatagtagatttatttttgtagttagatatggtcgtaattaattttggtaaatattttggtagggagtgtgattgtttttattttagagatgaagaaattgaagattttagaaattaagttgaaaagtggtaataggtagatttaaaattgaggtttgtagattttaagttcgtagttttttttatgtttgttttttgttttttattattaatgaatttttttttgttattaaagattgtttgaaaggaaatttttagtggttaaaatagttaaaattttttttttttttttttgattttttgggagtttatgtttgagatggtgtaagagtatatttgttgtagttggtaaatgttttacgtggtaggaatgttataggagtaatttaaatagttgtagtagttgtagtgttagagaagtaggttttagtttttttttgatttagtggtttttaaatggagtatttttttattaggggatatttaataatgttggaagatatttgggttgtcgtagttggggagaggggtgttattggtattatgtttataggatgttgtaaatattttgttgtgtttaggatagtttttataataaagaattattagattttaagtgttaaaagtgttatggttgagaaagtttgtaatttaaggtgggttgagggtaggttttaaggaatggagtagttttaagattatggatttttagattttgttatatttttttacgaaatcgaagtaaagcgggagggttttggaattttggggttgttttttgatttaagttgtgatttttgtaga

SEQ ID NO: 120 - DNA, 16258 bp, Artificial Sequence
  chemically treated genomic DNA (Homo sapiens)
tttgtagagattatagtttaggttaggaagtagttttagggttttagggttttttcgttttatttcggtttcgtagaaagatgtaatagaatttgaagatttatagttttgagattattttattttttgaaatttatttttaatttattttgggttataggtttttttaattatggtatttttgatatttggggtttgataattttttgttatgggggttgttttgagtatagtaggatgtttatagtattttgtgaatatggtgttagtagtatttttttttttagttgcgataatttaaatgttttttaatattgttaagtgttttttggtggggaagtgttttatttgagaattattggattagagagaagttgaaatttatttttttaatattgtagttattgtagttgtttgaattgtttttgtgatatttttgttacgtggggtatttgttaattgtagtaaatgtgtttttgtattattttaaatataaatttttagaaaattaaagagaaaaagagaaaattttagttattttggttattgaaaatttttttttagataatttttaatgataagaggaaatttattagtaatgaagagtaggagatagatatggaaagagttgcgggtttaaaatttataggttttagttttgaatttatttgttgttattttttagtttaatttttaggatttttagtttttttatttttgaaatgaggataattatattttttattagagtgtttgttaggattaattacgattatgtttagttgtagaggtgaatttgttgttggagagagtttgggacgttgttttttgatttgttattaaaggatttttttttatttattttgatggatagtcgttttttttttttttttttttttttttttttttttgagacggagtttttttttgttgtttaggttggagtgtagtggcgtaatttcggtttattgtaagtttcgttttttgggtttacgttatttttttgttttagttttttaaatagttgggattataggtattcgttattacgtttggttaattttttgtattttttagtagagacggggttttattgtgttagttaggatggttttaattttttgatttcgtgatttgtttgttttggttttttaaagtattgggattataggcgtgtagttacgtttggttagagagtttttttttataggtaatataggtttatgtttggttttttagtgataagataagtattattttacggtatttaaatttatagagaattttttttttttttttttttttttttttttgagatattttttgttttggttggagtgttgtggtgttattatagtttattgtgattttaattttttgggtttaagtgatttttttattttagtttttcgagtagttgagattataggtgtatgttattatgtttggttaattaaaaaatatatttttatagagataggggttttattatattgtttaagttggttttaaatttttgggtttaagcgatttttttgttttagttttttaaagtgttgggattgtaggtatgagttattgtgttcggtttaaagaggatgttttgagagaggtaagtgaggagttagaaagggagagaaataatgattatttttgttttgttatggggttttagatggggtggagtgaatttttgaagagtagtatttgtaaggagttttggtgaagagtaaaaatatattatatatatatatatatatatatatatatattatatatatatattatatatatatagtatatatatattatatatatataatatatatattatatatatatattatatatataatatatataatatatatatattatatatatatataatatatatattatatatatattatatatattatatattatatatataatatatatattatatatatattatatatacgttttttatgtaataaataatatatatattttttatggtatatatattatatatatattttttatatgtatataaatattatatatatatacgtttttttatatgtatatatattatatatatataagtatatacgttttttaaatgtatatatattatatatatatacgtatatatgttttttatatgtatatatattatatattttatatttttatatgtttttagtatatatatatattttttatatatattttatatatatatatttatattttatttttatatatatgtatatatatatatattatatatatattatatatatattatatatatattttatatatatattatatatatatatatttattttttatatatataggtagaaatatatatattatatatattatatatatatatatatagtttatatattttttatatatatatattttatatatatattatatatatatagtttattttatatatatatagtttattttttatatatatatatgtatatataataggtttggtttattttttatttgattcgttttgtgtatttatttatttattcgtttatttagttatttaattatttaatatattgggcgtttaatgtgaataagtattgttttaagtgttggggatatagcggtgaataaataagatagataaaaattttttttttatagttgttttattgtttgattttgttatagataaagagagaggggtgggggtgaggggaagggaagaaaatgttgattaaaaaatttttttttgggtacgacggtttatgtttataaattttagtattttgggaggttgagatgggtagattgtttgagtttaggagtttttagttagttcgggtaatatggtgaaatttcgtttttattaaaaatttaaaaatttgttgggtatgatgtgtatttgtaattttaattatttaggaggttgaggtggaaggattatttgagtacgggacgtagaggttgtagtaagttgagatcgtattattgtattttagtttgggtgatagtgtaagattttgttttaaaaaaaaaaaaaaagaaaaaagaaaaaattttttttatttgagtgtgatggtaaacgtttgaattttagtatttcgagaagttaagtaaggtaggaggattatttgagttttggagtttgagattagattgggtaatatagggaaattttgtttttattaaaaaaaatttaaaaattagttgggtgtggtggtatacgtttgtggttttagttatttacgaggttgaggtgggaggattatttgagtttaggaatttaaggttgtagtgagttatggttgtattattgtattttagtttgggttataaaatgagattttgttttaaaaaaaaaaaaaaaaattttttttaattttttttttagtaagacgaaagtgtaattagttttatttatatagttaagtgtagtttttgattatttttttagtttgatgagtgttttaaagtttgaagttttttggggttaggggtggggttttggttagtagtatagttaataagtatagtttagttggtggagttggttggtttttagggtttatgttttagagttgggggttttgttaggtattatggagagttagttttttgatcgttttgatgggattttagtaaaaatgattagagagattatggaggagagattagagcgattaaatgattaggttatagagtttttgagtatagagtatttaatttattttttatttttttattgtttttttgaatttaagttataggtatattttgtgggcgtagtagaaattatggtttatttttttgggagtagtaaagttattttaggtgggttttcgttaattttgtcggtttagttaattttattaaataaatatgtatgattagttaattggattttaggaagtatagtattttcgggtaagtaagatagttgtttttagtagattattgttaatggtaaagatatatattaagaaattatatgagaatgtaataaattgtaattgtagtaagtattaagaagaaaaatataggagtggttaaaaagagaggtttggggagtaatattttagttgaggagaggagggagaagagagtgatttagagagagggaatagtatgtgggaaggtttgaggtaggcggagtttagaatttttgagtatttggaatttggttagtgtggttggagtatggggaaaggagggtaaatcggggtgagggttatagaaaagattgggtgtttattttatatttattttatttgttttttttatgtgttttgtagttaaggagtgggatggaaggatttgaattttaaaaaaattattttaggttgggtatagtggtttacgtttgtaattttagtagtttgggaggttaaggcgggaggattatttgagattaggagtttgagattagtttgagtaatatggtgaaattttatttgtattaaaaatataaaaataagttaggcgtggtggtatatgtttgtagttttagttagtagggaggttaaggtaggagaatcgtttgaatttgggagatggaggttgtagtgagtcgagattacgttattgtattttagtttgggaaatagagtaagattttgttttaaaaaaaaaataaataaataaataaattattttagttattacgtgtagagtagaagggagattaggttattgtagaggttaatagatagtagatgggtatttgggtaatggaacgggttacggtaggggttaaaagtattagttttgaggattattgaggatgtaaattaaaaagatttgttattttatgaggtaaatgtaaataaaaattagtatgagatattattttttattttgtgagttcgatttagagagtttaatttttttagattttatatgtgagattatgtagtgtttgttttttcgtgtttggtttattttattttggtgataaattgtatatttttatatattaatatgtattttgtgtgtgtgtgtgtagagatagagttttattttgttgtttaggttggttttaatttttttgttttagttttttaaagtgttggtattataggtgtgagttgttatgtttagtttgtatattttatttatttaaattttttttgttgttgttttgagatagagtttcgttttgtcgtttaggttggagtgtagtggtataattttagtttattgtagtttttattttttcggtttaagtaatttttttgttttagtttttcggatagttgggattataggtgtatgttattacgtttggttaatttttgtatttttagtagagacggggttttattatgttggttaggttggttttaaatttttgattttaagtgatttatttgttttgggttttagagtgttgggattataggtgtgagttaatatattaggttattatttatttttttttttttttttttttttgagacggattttcgttttgtcgtttaggttggagtgtagtggcgcgatttcggtttattgtaagtttcgtttttcggggtttacgttatttttttgttttagtttttcgagtagttgggattataggcgttcgttattacgttcggttaattttttgtatttttagtagagacggggttttatcgtgttagttaggatggtttcgattttttgatttcgtgattcgttcgtttcggttttttaaagtgttgggattataggcgtgagttatcgcgttcggtttatttatattttttatagagatagggttttgttatgttgtttaagttagttttgaatttttggttttaagtaattttttcgttttagttttttaaagtgttggttttataagtgtgagttatagtgttagtttgggtttgtgtattttagaggggtgaaattgtatggtattgagatatatttttaataaagatgtagtattatattttaaaaggtatatagtagaaagaaggtttaagttatttttttttttttttttgttttttaggagggagaataaaaagaatttggtattgggttggattagggtataaggaaaagggaggggttgaagaggatgtgcgggtttttggttagtttgttaaaatgagaagttttagtgatttttagtcgtgatcgggaggtttttttttagaggttaaggaggttgttaagacgttgagttgtgttttagggaaaattagaaattatattttttatgttgttagtaaattagtttttttttttttataatatagagaatattttgagattttagtaataacgattattttaagaaagaaaagaaattttttgggggatgtgtatttttttaaatgatcgggttagtaaagtattgaaatatagtagtagttatattttatttttacgtgagttaagttatttgtttgttatgtggattttatattgagtgttgttattaagtagtagtaaattagtttaataatgttatatatcggatattatagcgtatattttatagttaataatgtaggttaggcgcggtggtttatatttgtaattttagtattttggtgggaggtcgaggtgggtagattacgaggttaggagtttaagattagtttggataatatggtgaaatttcgtttttattaaaaatataaaagttagtcgggtatggtggtatacgtttgtaattttagttattcgggaggttgaggtaggagaattgtttgaattcgggaggtggaggttgtagtgagttgaaattatattattgtattttaggatgggtaataagagtaagattttgttttaaaaaaaaaaaaaaaaatgtatagtttattattaaattaatgttatttttttaaattagtgagaatttttaataaatatcgtttgtaattattttttttttgatttgtttttttttttttaaaaatttgaattttttttatgttttttaaagtattttttagtgttttttagggttatagtttttaattttggttttagtatattttttatatttattttgttatagtttttttttttaggttgataatttttaaggttgattttttgatagggtacgatttaaggttattgggaaggaagtttaaattattttttttagaaatttattttgaagtttttgttgttagagagatatttttttagtttaaagtttttttttgttaggaatttgtagttagaatgtaaatatttcggagtagttagcgtttatggaggattagtattttaagttatgttattttattatattgttgaatttagttttataaataggtagtgggaggggtagggagagatgagtatcgttagtcgttgcggtggtttggagtatagtttttggagtttaggagtgtgggttcgaagtttggttttgttgggtatgtgtggttttggcgaattttttgagttttttagtttttttatttttagaatggggataatgggtttggttcggtggtttatgtttataattttagtattttgggaggtcgaggtaggaggatggtttgagttaggagtttgagattagtttgggtaatatagtgagatttcgtttttacgaaaaaatttaaaaataaggtaggagtattttttgagtttaggagttgtaatgagtcgtgattgtgttattgtatttttgtttgggtgatagagttagattttgttttaaaaaaaaaatttttttttgaggataatgatattattataggaataaatgagtttattggtatagaatatttaggattatgtttggtttgtagtaggtgttataaatgtgttaattaatttattaattataaatgaatattagtgaggattcggagagtatagaggggtgttagttgttttaggatatttaattagttgttggtggagttattttataaaaatgtgtttttattttttaaagtatttcggtatttttttattgaggtggggaattttatttaataattttttgttttttttttgagatagaattttattttggttggagttacgtaggttggagcgtagtggtattatttttgtttattgtaaattttattttttaggtttaggcgatttttttattttagtttttagagtagttgggattataggtacggtttttatgtttagttaatttttgtatattttgtagagattaagtttcgttatgttgtttaggttggttttaaatttgtgggtttaagtaattcgtttgtttcggttttttaaattgatgggattataggttagagttattgtatttggtttttaatttttatgtagttgtaaaatattttgttgtatttttttttttttttaatttattttattttttttttttttagattaatagttttttttttttggtagaaagtttttggtgtatatttgatagatgttagtgtttgttttttatataggagaaaagtagggttgagtgtagtggtttaggtttataatttaagtattttgggaggttgaggtagaaggtatatttgagtttagtagtttaagattagtttgggtatagtgagatttcgtttttttaaaatatttaaaaattagttaagggtggtgttatatgtttgtagttttagttattcgggaggttgaggtgggaggattgttggagtttcggattttaaggtcgcggtgagttatgattttattattgtattttggtttggttaatagagtaagattttgttttaaaattaaaaaaaaaaaaaaaggaaaaagaaagaaaaagaagagaaaaggttagtgaggttattgttatataattattgaggggtaggtagttggttttatattgttagacgttttttttttcggatcgcgtagtttttgtagttttcgtttgttttcgtatttttttttggtttttattttttttttcggttgtatttaatgatttttcggatttttatagattattgggatcgttttttttagagtgttttgggaagtttagtacgttttagttttttttttaaggggtaggttgtttttaggagcgggaagtttatttttatttttatttttttggtttagaggaggtttttttttttggagggttgaggtagtaggtagttgggttagtttatgtttttcgtatgtggttatttgaattattttttttcgtaatgtgttatttagttttagggtttgttacgtgggggtgtttttatttttttttgtagttggatttggtggacgtggggaacgtggtagttgtgtttttttttggatagcggaggatttttttggattttaaatatttaagtttttattattttcgttttttttttataaaatggaggtgatgatatttgatttgtttaatatttttttagttgtaagataaataagatgatttaagcgaaggggttgagtagattttaaagtagtgttttttagttgagggttgggagtggattttgttttttcggggatatcggttgttatttttgggggagggagttattgcgtttagaaggtagagttagggacgcggttaaatattttataatatataagatagtttttataacgaagcgttagttagtgttaaatggaaattacgcggaggtggagaaattagtttaaagaatgattgaaaagtagtaatatttacgatggtcgggcgcggtggtttatatttgtaattttagtattttgggaggtcgaggcgggcggattatttgaggttaggagttttagattagtttggttaatatggtgaaattttatttttattaaaaatataaaaattagtcgggtgtggtggtgtatgtttgtaattttagttatttgggaggttgaggtgggaggatcgtttgagtttagaaggtggaggttgtagtgaattttgatcgtattattgtattttagtttgggtgatagagtaagattttgtgttaaaaaaaaaaaaaaaaaaagcgagagagagagaaagaaaagtagtaatatttacggggaatttattttgtgttaggtattttatatgtattattttatttaattgttttagtattttatgaggcggtatggttattatttttattttataaatgagaaaattgaggtattgaagagttaaagaatttatttaagttttatagttagaataggatggagtaggaatgaattttgggggtttttattttttaggtttattttttttttttttttttttttgagatgaagtttcgtttttgttgattaggttggagtgtaatggcgtgattttagtttattgtagtttttgttttttaggtttaagtgatttttttgttttagttttttgagtagttgggattataggtatttgttattacgtttggttaatttttgtatttttagtagagatggggttttattatgttggttaggttggtttcgaattgttgattttaggtgatttatttattttagttttttaagatttatttttaatttatgtgttatagagtatgtttttagtttgtttatggtgagggttttatatttatgtttgaataaatgttgttttgtaaaaatgtgtattattttttttttattttaaatataagtagatgttattgtgatgaataaatgtaaatttttataaagtgttaataagttagtgttatttttttgatattatgtattttttttaattaagggaatttagaaagtaaattgtaattacgttgtaggagtttatgaaaattttttttttttaaaataagggagttttaggatttaaaaggtaggaaatttacgtgatagatttgaattaaatttaaattaagtaacgttttttttgagtttattttgtttttatgtagtttagttatgttatttgttgaaaaaattaattgttttgaagttaaaagtaaaacgaaagtagagcgaaatattttattaattatagaaggattttgtagttaatatgtttggtttaagttgggataaatgaattttttgggttttttttatttagttatagattttgttgttaaaggttgttttagtagaatgatttttatagagtatttgtttttaaattttttttttttttataaaagattatttgttggataagattttttttttttttttattataattttttttaatatagagttttttttgtaatattaggagttttttagcgattttttaggaaggttgtataggttttggtagttaagtttgtttttggtttttttttttgagtaatatatttatttttttttttatgttttgattttgttgttttatgtttgttttggaagggtagagtgtcgtttatttttttttagttaaagtaacgcgtgtattgaatggagagagaagatattttgggtgtattttggttatgttaaataatagttaatagtatttttatagttagattaagttagaataatttttttaggaatttggttttttttttatttttgtttttaaatgaaacgtttggggtttggttaagtaagtgggtgttttttggggattgtaggtttagtattgttttgatggaatagtttacggtatttttttattgttaaagtttttattagttaggtttatggtgaatgattggaagggttatttttgttaggaacgtatggtaaataatagttgttttttattttatatgatattaggtaatttgagggtaatagattgggttattagagattttaaagatgttttttttgttaggaaaattatagttaagtgttttttggtggagagttagttttgtttaagttatcgtgtaatattgtttggggaaagttttttattttttgtttttttttttttttttttttttttttgagacggagtttcgtttttgttttaggttggagtgtagtggtatgattttagtttattataattttcgtttttcgagtttaagcgatttttttgtttttattttttgagtagttgggattataggcgtgtattattacgttcggttaatttttatatttttagtagatacggggttttgttatgttggttaggttggtttcgaatttttgattttaagtgatttattttttttggttttttaaagtgttgggattataggcgtgagttatcgtgttcggttttttattttttattttaaggagtttagaatgatttagggatgttattttttgtgtatttattattattgggaaggtggtaaatatttcgaatttttttttaggtagggtagggaaaatgagttatatttgttggttcgggttcggttattttaaggttaggttattgttagttttttatgtttggtatttatttagttgttatagggtatattagcgtaagtggttaaaatttaaagttttataagttttataggtttttatttttatagaatatatttttagttttatttgttgtggcgtaaatttagttattttagtgattgattttgaattttatgtatttttaaataagtagagattgggagtttgtgttaggtattgttttttgtattagtagtaaatttttagggttgtttagggtgggagattgtgagaagtttagtagcgtggtcgtttgtgtgtgtgtgtgtgttggggggtcgggggggtttttatttataagggagaatttagtatttttttttattagttattgtttgttttttttttttgcgtattattgttttagtatattgatttgtgattaacgtatagtaagattagaggtttttaattattttaaagatttagaaaaagtttttaaagaaaatgtattttaattgtaggggtagggtggggagaggaaattaacgatgggggagtgaggagacgggtataggtgtgtaatttaatataaagaagaattcggtcgggcgcggtggtttacgtttgtaattttagtatttggggaagttaaggtgggtggattatttgaggttaggagttcgagattagtttgattaatatggtgaaattttgtttttatcgaaaatataaaaattagttaggtatggtggtagacgtttgtaattttagttatttgggaggttgaggtaggagaatagttggaattcgggaggcggaggttgtagcgtatttagattatattattgtattttagtttgggcgatagagcgagatttattttcgttttttattttttttttaaaaataatcgtttaaagtttgtagttattagttatgttaagtgtatgatatttgtttttatttaggtttagattttttatttttttttgtttttgggcgagggggtaattaaaatcgggggtcgttgggggggacgcggatatttttagttttcgttttgacggtttagttcggggaagcggggatagtgagttaggtttttaggtttagaggggattatttcgggagttgcgggtcgtagtattcggtttttgttagtgatagggcgtcgtaagtatagttatggcgttattaacgttcgattcgtgttttcgttttggagggagtcgagcgcggggacgggggcgtggcgggaggtcgttatgacgttaggttgcgggtcgtttagttagtttttttgtttggcgggtttgcgggtttcgggtgggttttgtttttgtttaggatttttttgttttagttcggatttttttcggtttttgttttagttcgggtttttttcggtttttgttttagttcgggttttttttagtttcggtttttttttgttttagtttagattttttttagttttagttcgggttttttttcgtttttgttcgagttttttttagttttattcgggttttttttagtttttgttagagttttttttagtttcgttcgggttttgtttttggttagggattttttaattttcgtggcgggcggattagtttttaggtttttgttttaggtcgttatgaggtcgaggtttgtaggtttcgcgagtagggcggggtgggagattgtgagaagtttagtggtttaaagatggaggagggggatggtagcggtgaggtgggattggggggaggggagtggttttggtaaatttgaggtaagaggatcgtttgagtttaggaattcgattatgttattgtattttagtttaggtgatagagtaagattttgtttttagaaataaaaaaaattaaaaattaaagttttatttggatgtttagaggtgaattgatgaggggataagagatcgttggatttggaagtggggagaaggagtagtggaaggtttttgtcgtagtttaggtgaaagaataatgtgatttggattagtatggggatggagaagatagaagtagatatatttgagggatatttaggatggaaaattgataattatttggtgataggatgggggagaggaaataggagcgtttttgttattgttataataaaatataattaggttaggcgtggtagtttgtaaatttagtattttgggaggttggggtaagtggattatttgaggttagaagttcgagattagtttggttaatatggtgaaatttcgtttttattaaaaatgttaaaaaaaaaaaaaaaattagtcggtcgtggtggtgtgcgtttgtaattttaattatttgggaggttgaagtaggagaatcgtttgaatttaagaggcggaagttgtagtgagttgagatcgtattattatattttagtttgggtgatagagcgagatttttgtttttaaaaaaaaaaagtaaaatagaaataaaagttatttttttgaattagaatgaaaagtaaatgttttatataagaaaaatttaattagggtaaaatattgggttaatattatattataaagtaagttggtatattttcgggttgttttgtgattagataatgatattaggattttagttattattggttttatttttgttaggaatgttttagaattttaaagttttgttacgggttttttttgtataggttgttaatggttttttttttttatttataaatttatttggttagtgttttttttgtagtaatagaattgggaataagatttgcggttgtttaaaataaagatatttttttattgtttttgtagttagtatagatataaagtttcgtttaatgtagtgtatgtaagatgttatatggtaggtagtttttagaaattttgtttttttagttttgtttatttttttattttgttttttggaatgtagatgttattagtttgggttttgagattgaagttttataggatagagtattaagttaggaggagttggggttttttattttgtggagtattattttagttttttattattaatttgatttagtagggaagaaaaatattttattttgttttttgttatttgtagttgaaatcgttttttattggtagaattattaaatggatgtttggaaattttagagaatttcgaatacgtatttatattacgtttttaagttattaggttattaagtataattttaggtattattaggttttagtatttgtttttttacgtttttttaggtttatttttgtttttgttaggtgtttggatatttagttttgtgagaggaagggttggtatttttagggttaatattattttttttttttttagttagtttttgtgtgtgttgtgagtggaagggcgtgaggattagaggtattttttttattagtaatagaaatagttttcgggtatgatttttatttttttagtcgtgatttcgacgtgtttataagttggtggtgatttggggaagtcggcgtttttatttttttttaaaataagtatgttattttttaaaaattatagttaattaggtgtgatttttaaaaaatgaaatgttaggtagggtatggttttttttttaaaaattttaaattttgtaattaagatgtaatttatatattataaaattggtttttttaatcgaataatttagtagtatgtttataagtttgtgtaattattattattatgtaattttataatattgttattatttttaaaaagaaatttttattttttagttgttagtttttagtttttttcgatagttttggtaattatttttttatcgtggatttgtttattttgtatattttttgtaaatagatttatatgttttgtggtttttatgtttgatttttttaatttagtacgtttttaaggtttatcgtagtatatgtagtgttttattttttttattgtttcgtaatattttattatatggatatattattttttttttttttt

SEQ ID NO: 121 - DNA, 5309 bp, Artificial Sequence
  chemically treated genomic DNA (Homo sapiens)
ttttttaagtagttgggattataggtgcgtgttattacgtttagttaatttttgtatttttagtaaagatagagttttattatattggttaggttggtttttaatttttgattttatgatttatttgttttagttttttaaagttttgggattataggcgtgagttattgggttttgttaatttttgtatttttagtagagatggggttttattatgttggttaggttgatttcgatttttcgattttagatgattcgtttatttcggttttttaaagtgttgggattataggcgtgagttatggtgttgggtatatacgtagatttttgattgtgaagggattagtatttttgatattgtattatttaggggttaattgtatatttatattttttttattatttattagttttatgtgtgattttggttaagttattgtttttgtttatagtaggaataaagtatttgatttagtagttagtaatatggaggatttgtttaatgatgtcgattttttttgttttttatggacgtaattaatttatgattatttgcgatatatgtttattttatttttttgtttaatagaatatttttgttttgaattaagtttttttttttttttttagtagttaatgtgttttttgaggatgtaatttaatcgtaattttgttcgaagtggggaaaaaaattaagtttatattgaaattttaatatagttttataattatttttttttttagtttagattattttattttggtaatttaagtattatttttggttttattaataatattatttttgtaaaggataggttataattaatttttagatttttgtttggataagatttgtgattttaaattttaaaaaagtagaaaaaaattttataaattataggtaggaagaaagaaaaataagagaatgtagttaaggtaattttattaatgattagtttatgttaaagtatgtggaaataatgttttataggaggatatttagtaataacgatttttttaaatttatttttttttgtaggtatagaattgtaagttttttttgattttaaatgtgtatagttgattgcgtgtgtgtgtgtgtgtgtgtgtgtgtgtgtgtgtgtgtgtgtgtgttagggttttttttttttgtttagattggagtaaggtgatataattatagtttattgtagttatgaatttttgggtttaagtgatttttttgtttttagttttttggcgtagttaggattgtaggtatatgttattatatttagttattgttttttggtagagatagagttttgttatgttgtttaagttggttttaaatttttggttttaagtaatttttttattttagttttttaaagagttgggattataagtatgaattattgtatttggttttatatttgattatattttttagttttttttgtggttaggttgtgttaggtagttttgtatttaaattttgattagtgagtagtaagtggaatttgttggatgaatttattataaaggatttttataatggagatagtggggttaggtatggtggtttatgtttgtaattttagtattttgggaggttgaggtaggtagattattttagtttaggagttcgagattagtttggttaatatggtgaaattttatttttattaaaaatataaaaattagttaggtatggtggtacgtatttgtaattttagttatttaggaggttaaggtaggagaattatttgaatttaggaggtggaggttgtagtgagtcgagatcgtattattgtattttagtttagtaataaagtaagatttttgattcggaaagaaaaaataaaaaaaggttgggggagatagtgggagtttagatttttgtttttttttttgtttagaagggagatgaggttgttggtgttgtggaagttattatggattatgaggtagttttgaagatagaaagtttgtatttttgatgatttaatggaattttattttaatttaggattgattgttttagatttttgttatatgagggaatatatttttttgtgtttaagaaattgtggttggatttgttattggaatatgaatgtagttaataattggtttaaaatgattttattttaatttatattggttgttttttttaaataatatataggtttgtattgtggtgggttttaggatggttgtgatgtagttttaggaagtttatttatgggaaatttatatttatggtgttttgatgttgtagaggatattttgagttggttggagtaatttgggatataggttaatcgattgtaatttaatttttgaggttatttagtattttttatagtggttatttaaaaaaaaggtagttaggtgtggtggtttaagtttatatagattttagaattttggaaggttgaggtgggaggattatttgagttaaggagtttgaggttagtttgggtaatatgaagaaattttgtttttataaaaaataaaaaaaattagttaggtatggtggtatgtatttgtagttttagttttttgggaggttgaggtggaagaatgatatgagtttagtaagtcgttgtaattagtcgtgattacgtcgttgtattttagtttgggcgataaaaagaaaaagaaaacggagtttgtttattgggtgtggtagataaggtaaatttttttttattttttatattttataattttggatgtgtttatagttatggtagtgttttgtaatgatgtagttgatgataggtgtgatgttggagatttttttatttgattgttgttattagttttattagtttttaacgtttggtgtttgttttaaagggtatgttttaggagtcgttttaaatttttaaagtattattttttatataaataagaagtgtaagtaagtagtttgagtttagttttttaataggaatattttattattattagattaagtttttttattataatgattgatttgtttttgaattttgtggatttattttttaaaatgttttttttttttagtttttatagttagtgttttaaaagtgatttgtagtattttttgttgagacgaatgtattagttttttaattagtttgtattttttttatttttttaagttagtgttagattattttgtttgaaaaattatttttagtgtgttttattttagtagaaatgttttttagtttttaattaataattatattaaatttttgtttttgtttgcgttttaagggtatttataggtcgggcgtcgtggtttttatttgtaattttagtattttggaaggtcgaggcgggtagattatttgaggttaggcgttcgagattattttgattaatatagtgaaatttcgtttttattaaaaatataaaaaaaaaaaaaatagtggggcgtggaggtgtacgtttgtaattttagttattcgggaggttgaggtaggagaatcgtttgaattcgggaggtagaggttttagtgagtcgatatcgcgatatagtattttagtttgagcgatagagcgaggttgtgttttaaaaataaataaataataaattaaaaaaataagagtatttataatttggttttagtttgaatttttttttttattttaatacgtagttttagttatatttttttgacgtttgtaaataagtttagttttttttgttgtgaagttaagtttaggtggttttttttcgtttgattgtttttttattttatttatcggaagtttagttatttttcggagggttgtacgggggttgtaagaagtaacggaaacggtttagtatttgttattttttattatattttttttaataaaggggtaattttcgttaatggtagtgtagattttttaatttttatatatggaagatttatattatttaggattgttgtttaattgttgagagagtatttgatatttaatagtttattaggttataagatagcgtaggaaagaattttttgttgtttttttatgttattttgaatagttggtttatagagttattgtaaatatataaaatatgattgttagggtttagtagtgaggaaggtgggaattagttttgatttagttaattgtgtttaggagaagttgtttaattttaaaggattttattattattagaattaataatattaattttaggggtaaaaataaagataaatgtgtgtaaattttgtttgtagtttcgggtacgtcgtgggtgtttaagaattgtttttaggtagtcggtggggataaagtttgtgtgttttttgttttggaataggttttaaggtcggtttatttgtaaagtaagggtacggcgtaagagtattgaatacgggttggaagggcgttggttttatttttagtttataggtcggttgggcggcgttgattagtagttaggtttcgttttttttaggaacggttacgggggttttgggagggtatgaatgtttttttgtagtgaggtttttggatttcgcggtttttcggtagcgtaattaaaatttaggggtaggcgtcgtagtcgtttagtgtagttagattttcgtcggtatttttaggggcggagtcggaggtagggttttcgggtcgtattaattttacgggggtaggggtcgttttttttcggtcgcgcgttatttaagtacggtagataggtagcgaggttgtcgaggtcgaggttagtttgtagttttttttttttcgtgttttgggcgcggggtgtacggtaagcgcgggcgggcgggataggtacgtagggtattttcggggttgggcgcggcgggcgcggggcggggttcgcggggggggggggcggggcggcggtgtttttgcggcgtagttggggtcgcggttttgtttttcgcgtttttttaaggttcgcgggcggcgtaggagcggtattcgtggttgtggtggtttcggtagcggttttagtagatcggcggtattagcggtagtattagtattagtagtatgttgagtcgggtagtgtgcgggtgagaagaaaggggattcggttacggttttaagggcgaaggggttcgcggcgggtagggttttcgcggtaatggcgatagtggtcgtatcgggtttggcgggatcggggtatttgtaggcggttttttcgggagtgttcggcgcggcggttggagcggggattcgtagggaggggacgcggggattcgggggacgtcgcgcgttgtcgtttttcggtagtttagtttgcgtagacggtttcgcggcgttgattgatcgggttgtgttttttcgtttttagt

SEQ ID NO: 122 - DNA, 5309 bp, Artificial Sequence
  chemically treated genomic DNA (Homo sapiens)
gttgaagacgagaaagtatagttcggttagttagcgtcgcgggatcgtttacgtaggttgggttgtcgaggaacggtagcgcgcggcgtttttcgagttttcgcgttttttttttgcggattttcgttttagtcgtcgcgtcgggtattttcgggagaatcgtttgtaggtgtttcggtttcgttaggttcggtgcggttattgtcgttattgtcgcggaggttttgttcgtcgcgagttttttcgtttttggggtcgtgatcgggttttttttttttttattcgtatattgttcggtttaatatgttgttagtgttggtgttatcgttgatgtcgtcgatttgttgaagtcgttgtcgaagttattatagttacgagtgtcgtttttgcgtcgttcgcgggttttaagaaagcgcggggagtagggtcgcgattttagttgcgtcgtaagggtatcgtcgtttcgtttttttttttcgcgggtttcgtttcgcgttcgtcgcgtttaatttcgggggtgttttgcgtgtttgtttcgttcgttcgcgtttgtcgtatatttcgcgtttagggtacgggagaaaggaggttgtaggttagtttcggtttcggtaatttcgttgtttgtttgtcgtatttgagtggcgcgcggtcgaagggaggcggtttttgttttcgtggagttggtacggttcgaaggttttgttttcggtttcgtttttgagggtgtcggcggggatttggttgtattaggcggttgcggcgtttgtttttgagttttggttgcgttgtcggggggtcgcggggtttagaggttttattgtaaaaagatatttatatttttttagggttttcgtggtcgtttttagggaagacggggtttagttgttggttagcgtcgtttagtcggtttatgagttgagggtagagttagcgtttttttaattcgtatttagtatttttgcgtcgtatttttgttttgtaagtaagtcgattttgggatttattttaggataggaggtatatagattttgtttttatcggttgtttaagaatagtttttggatatttacgacgtgttcgagattgtaggtaggatttgtatatatttatttttatttttatttttagggttggtattattgattttagtaatagtgaaattttttgaggttaagtagttttttttgggtatagttaattgagttaggattagtttttattttttttattattaagttttggtagttatgttttgtgtgtttatagtaattttgtgaattaattgtttaggataatataaaaggataatagaggatttttttttgcgttgttttgtagtttagtaagttgttaagtattaagtgtttttttaatagttaaataataattttgaatggtgtgaattttttatgtgtagaggttaggaaatttatattgttattggcgggagttgtttttttattgaaaagaatatgatggaaggtagtaggtgttgaatcgttttcgttgttttttgtaattttcgtatagtttttcgaaggatgattaggttttcggtaagtggaatgggaaaatagttaggcgaagaggaattatttgaatttggttttataataggaagggttgggtttgtttatagacgttagaagaatgtaattagggttacgtgttggggtgaaaaaggaaatttaggttgggattaggttatagatatttttatttttttaatttattatttatttatttttgagatatagtttcgttttgtcgtttaggttggagtattgtgtcgcgatgtcggtttattggaatttttgtttttcgggtttaagcgatttttttgttttagtttttcgagtagttggaattataggcgtgtatttttacgttttattattttttttttttttgtatttttggtagagacggggttttattatgttggttaggatggtttcgaacgtttgattttaagtgatttgttcgtttcggttttttaaagtgttgggattataggtaggagttacggcgttcggtttatagatatttttaaaacgtagataagagtaggggtttgatgtgattgttaattggaagttgagaaatatttttgttgaggtgagatatattgaaagtggttttttaggtaaggtggtttggtattgatttggggggatgaagggagtgtaggttagttaggaagttggtatattcgttttagtaggaggtattgtaggttatttttagggtattagttatgagaattggaagaaaagggtattttgaaggatgaatttataggatttagagatagattagttattgtaatggaaagatttgatttagtgataatgaaatatttttattgggaggttgagtttaggttatttatttgtattttttgtttgtatagagagtgatattttgagagtttaaagcgatttttaggatatgttttttagaataagtattaaacgttgggggttggtaggattgatagtagtagttaggtagaagaatttttaatattatatttgttattagttatattattataaaatattattatgattgtgagtatatttaaggttgtgggatatgggaggtaaagaaaagtttattttgtttattatatttagtgaataggtttcgttttttttttttttttgtcgtttaggttggagtgtagcggcgtgattacggttgattgtagcgatttgttgggtttatgttatttttttattttagttttttaagaagttggaattataggtgtatattattatgtttggttaattttttttattttttgtagaaatagagtttttttatgttgtttaggttggttttaaattttttggtttaagtgatttttttattttagttttttaaagttttgggatttatataggtttgagttattatatttggttgttttttttttaggtggttattgtagagggtattgaatggttttagaagttagattatagtcgattgatttgtgttttaagttattttagttagtttaggatgttttttgtaatattaggatattatgaatatggattttttatagataaattttttaaggttatattatagttattttgagatttattatagtatagatttatatattgtttggaagaagtaattaatgtgggttgagatgaagttattttgagttagttattaattgtatttatattttagtaatagatttaattatagttttttaaatatagaagagtgtatttttttatgtaataaagatttggggtagttagttttgggttgggatgaaattttattgagttattaaggatgtaggttttttgtttttaaagttgttttatggtttataatagtttttatagtattagtaattttattttttttttaggtaaggggaaggataaaagtttgggtttttattgttttttttaatttttttttatttttttttttcgaattaagagttttgttttgttgttgggttggagtgtagtggtgcgatttcggtttattgtaatttttattttttgagtttaagtgatttttttgttttagttttttgagtagttgggattataggtgcgtgttattatgtttggttaatttttgtatttttagtggagatggggttttattatgttggttaggttggtttcgaatttttagattgaagtgatttgtttgttttagttttttaaagtgttgggattataggtatgagttattatgtttggttttattatttttattgtaaggattttttgtggtagatttatttaataaattttatttgttgtttattggttaaaatttaggtataaggttatttagtatagtttagttataaaggaagttgagaaatgtagttaggtatggggttaggtgtagtggtttatgtttgtaattttagttttttgagaggttgaggtgggaagattgtttgaggttaggagtttgagattagtttaggtaatatagtaagattttgtttttattaaaaaatagtagttgggtgtggtagtatgtgtttgtagttttagttacgttaggaggttgaaggtaggaggattatttgagtttaagagtttatggttgtaatgagttatgattatgttattttattttagtttgggtaagagaaggagattttgatatatatatatatatatatatatatatatatatatatatatatacgtagttagttatatatatttgaagttagaaaaaatttgtaattttgtatttataggagaaaatgagtttaaaaaaatcgttgttgttaaatatttttttataaggtattatttttatatgttttgatataaattgattattaatggaattattttagttatatttttttgtttttttttttttttgtttgtggtttgtggggtttttttttgtttttttaaaatttggggttataaattttatttaggtaggaatttgagaattggttgtaatttgttttttgtaagagtggtattgttaataggattaaaagtagtatttaaattgttaaaatgaagtgatttaggttaaaagagaaaatgattatagagttatattaaggttttaatgtgagtttaatttttttttttatttcgggtaaaattacgattagattgtatttttaaagaatatattaattattggaaaggaaaggaggagtttggtttagaataaaagtgttttgttaaataaagggataaagtgggtatgtgtcgtaggtaattatgagttgattacgtttataaagggtaaagggagtcggtattattgagtagattttttatgttgttagttattaagttaaatgttttatttttgttgtaagtaaagatagtgatttgattaaggttatatatagagttagtaggtagtaagggggatatgaatgtatagttgatttttgaatgatgtagtgttaggggtgttggtttttttatagttagaaatttgcgtatatgtttagtattatggtttacgtttgtaattttaatattttgggaggtcgaggtgggcggattatttgaggtcgggaaatcgagattagtttggttaatatggtgaaattttatttttattaaaaatataaaaattggtagggtttagtggtttacgtttataattttaggattttgggaggttgaggtaggtggattatgaggttaggaattggagattagtttggttaatatggtgaaattttgtttttattaaaaatataaaaattagttaggcgtggtggtacgtatttgtagttttagttatttgggagg

SEQ ID NO: 123 - DNA, 6136 bp, Artificial Sequence
  chemically treated genomic DNA (Homo sapiens)
tgataagttttttttgttaaagtggatagaagttgggagagatattttagaagtttatgttttggttttaggttaaggttgttaatagttcgtataggttgagtattttttatttaaaatgtttgggattagaattgtttcggattttggatttttttagatttggggatatttttatatatataatgagatattttgggaatggaatataagtttaaatgtgaaatttatttgtgttttgtgtatatttaaaatatatagtatgaagttaattttatataatttaaaaaataattttgtgtatgaaataaagtttatatatattgaattattagaaagtaaaggtgttattgttttatgttggtgtttaaaaaattttagattttggagtttttaaatggaaggatgttaaatttgtagtatatttttattgtgtagaggatgttttaagatttaatcgtattttttttgttttttttagaagggtaagatggagtttgtatagttgggttatgatttaggaatattatgaggaggtgggttgttttgtatgattgttttaatattttgtgaagtgaaatttaaaatatattattatagttataatatagaattttttaattttttagatgttggtttttttgtagttgtttttttttaggtgattttggtgagtgatggtggtttggggattatgatggaagttatgatttattttatttaaaattatttttgaagattggttagaattattttggatttatttttgagtgagatatatggcggttgttttatttttttttttaggttttggatttgaggtttttttttgaattttgttagttttgttagtatttagaatttttaattatttttttaaaataaattttgagttaagaggattttttttttttttatatttttttttaatattaattttttaaaattttaagagtagtttgttttatttttgtttttagattttgttttttatatgtggtaatggtaatgtttgtgtattttatatagttttttggagaattttcgtttattttttttattagtttgtttattttgggagtatggaggaaaggggttgggttaagttggtttttagagtggggagagtattttttttttatggtgaaattgtagggtgtgtgtgtgacggggtaagtagggggataggtgaagagatggttaatggagttttggaattggtgagattgaaggttagtagtttgaaggttttaaattttttttttatatttaatggggatgatattggaataattaattagattttggtttttatttgtaaaataagagtatgatattgggaagattttgtggttttttgtatatatgtttttttaaatagattatgagttttttgaattaaggttgtgatttttatatttttatagttatggtgtttagtatagggtttgatatataattgtattagttaggtataaatttggttgttagtaatagaaatttattaatagtagaatgtgttgaggttgatttttttttattataagaagattagagttgtgtaggtgttggttaaggtgtttagtgaggtttttgaggattaaggttttttttattttttttttttattattttgggtatgttggttttatgtttttatttttgttattgtatggatttaaagtagttattatgttgttagatattatatttatattttaggtaaaggaaagggaaaaatattagttatttttgttttttataaagaaagaaaaagttttttttaaaggtatattaggttatgttttatggattatgtgttgggttatatgattaatgttagatgaaagggattttgggaaagtaaatgttaagttttttggttttttgggaaggagagagtaagaattggggtatatatggttgttgagtttattgaatgtttggtaaataaatataattagaaaataagttggaaaagtttttttttttttttttaagtagagtgtattatgatattattttgaggaaataagtattaaattggatttgtttttaagttatgatattgtttttttattattattattatcggtatttttgggtgtgtttgagttaggttattttgtttttttttggtaaattagaattggtttaagtttttttataggtatggggtagggagtagaattggagggagagttagagtttatgaagaatttagtgtggagggatttaattttggtgtttttttaagtgaatattttatatatatttattttcggattaggaaaggtattttttttgtattttgttattggttattttttttatgtggttttatgtgtaattagttgaaaaattattggtttttattggtgtttattatttttttttttatatatattgtgttaatatttaaagaggagggttgatatgtcgatagtgaaagtaaacgtgttagaatggggtatagaatagtatgtaatgttttttttttattgaggaatagtattaataatataaatgaagaggtgtatatgaagggtgtttatttttggtatagtagaggtttttagtaaatattagacgtgattatttttttttttttatttgagatagggttttgttttgttatttaggttggagcgtagtggtataattatagtttacggttattttaattttttgagtttaagttatttttttattttagtttttttagtagtttggattataagtatgtgttattatatttggttgattttttaaaatgttttgtagagatgggggtttcgtatggtgtttaggttggttttgttttaagtaatttttttgttttagttttttaaattgttgcgattgtaggtgtgagttattgtgtttggtttattattttatttttatttataataagaatgatgttttttttttttttgcgtattttgttagtgaggatttatttttttttgttaattagatgtttttagataaaattataagatttaagattgtattatgtagttttttggttttattttaatttttcggggggtttttgggagaattttgggtaggcgaaatatattgttagttttttagatgtgtttgaagtaatttggttgggtaaatagtgattatataaaatttggttttttagggaggttaatttgaaattttaattgtttttaaaaatttttttagggtaattattttattttttggtggaatttaagtttattagttttttgtatatatgaaaaggaagttatttataattggtatttttgtacgaaatgtataaagttttttagtagagagtttttttacgtgggaagagtgttttttaacgtattttttaaaattggtgtttgataatgtttatttgattttttagtgtattatatattaataaatgtgaaaagaataagaggttaattgtttaatgtttcgtttgtatggtagttattgatgttatagagattattgtgaaatgtgaatttttttgatttttttgttatttgtttttaattttgtttttatttttttattaggttaggtggtagtaaagtataatgattaagaatttaagtttaggaattaaagttttagggttgaattttgattttgttattttttatttttttaatttggggtttattatttttttttattggattttatttttttataaataaagttgttaaattaatatttattttataaaaagtattgtaagtattaaatacgatattatatgagaaagtgttttataaagtgtttagttgtaattttagaaaatttaatttaaatattttaagtaaaatgagaatgtatcgatttatataatgaaaatagagtatttgaatttatgttagtgggtttagattttattttattattttttttttttagagatagggttttgttatattgtttaggttggagtgtagtggaatatttatagaagtgattatagtatattatagttttgaatttttgggtttaagtaatttttttgttttagtttttttagtagttgggattatatatgcgtatattattgtattgagtttttattttatttttattttatagttttttgtattggttttatttttagatagttttttttttagtggagtatgatggttgtaataattttagttttttttttttagttttaagtttagtaagaaagagaggatgtattttttttaatagttttagtgaaaagtggtattgtattttattggttttgaaggtggattatttttgaattagtgtaatagtacgatttattatatttaagttataagttatttttggagtaggagatgaagttaatattatttgttggattgaaagtatagtggttttttagaaaggaaattgggatgttgttattaaaggaagagggaatgaatgttgttatggtggggaggttgggggcggtggcgagaaaaaggtagattttttttagaatgttattaaaatgaaagtaaatttaggttttagtataagttttagaatattagaacggagacgtgtttttttggattttaaacgaaataaaattaggttaagtgaagtaagtgttatttaaaatagtagttatgaatgtatataattaggattttaagaattgaatgaaaatataaatgttttaaaaatgggaagaaagatttataataaggaattagattgttgtagggtgggggtggggtggtgggtggtatggggaattttgaaaatttattagttgaggataattacgtttattaatagaatgtagaggtgtaagattgagttattggtgtttgagtttttagcgggttagaaggaaggacggtagggtggaagggttggagttttagttttgggaagttttttttttatttcgtagaatgtttgtttttggataaagattattagtttgagtttttttaagatgattttaggaagtttttgttggtaattaagttatttattttggggtgggatttagagatttagattttttataagtttttttgttatcgaaacgggtgtttgggattttacgaggttttgtttatttttcgtcgttgcgttttttattttgtattggatgtatttattgacgttgttgttttcgtttttagagtatgaatttttaaggtgatttatgtagttgtgggtgttcggtatatagtatggtgattggaatggatgagtatttaataaatatttgttgtaggaatgtaggaggacgggtaggttagtaagtaggttgtttggttttttttatatgggtttttttgggaaagaagagtttttatttttggaaagggttgttatgattgagaaaagtttatggtagtaaaaaaaggatagacgtcgggagggaaatatttttagtttttttagataatatattttttaaaaagatttttttatttttttaataataacggtaacgataatgataatgatgattatttatgagtgcggttagtgttagttattgtgttgttattgggcgagtaatgattttattggatttttacggtgggcgtgcggggtggatagttttatatttttattttatagatgatgaaaaggaggtgtagggagtggtgtagttgttttaggcgtatatagataggaagtgataaggttgggattttgtagtttgagtgtgttattacgatttattcgttgttttgtttttataggtatgatagtatagttttggagtaaatgttacgtatatttgtaaggtgtttatttttatgtagtaaaaataagttaataagttattgatttatagaaaagtaaagggttttttaataaagaggttattgtatatttttttaaataggcgatttttttttttatttttatttttttgttgtgtgttgaaggttattggttataagtcggtgaagtcgcggaatggaatttttggttcgaaaatttaaaaatgggaggggtagaggaggtggggatagagcgggaggaggtggaggcgaagtaattttataattcggggaggtttggtttgttttttttttttgaattggtttaatgattggtttttttacgttgattatttttttgggttggttttttgtattcgcgttaatagtttagg

SEQ ID NO: 124 - DNA, 6136 bp, Artificial Sequence
  chemically treated genomic DNA (Homo sapiens)
tttgggttgttagcgcgagtgtaggaggttagtttagaggagtggttagcgtgagggagttagttattgggttagtttagggaggaaaagtaggttagattttttcgggttgtagaattgtttcgtttttattttttttcgttttgtttttattttttttgttttttttatttttgggttttcgggttaaggattttatttcgcgattttatcggtttgtagttagtgatttttagtatatagtaggggaataaaaatgagaaagaaaatcgtttgtttggagaggtgtataatgatttttttattgagaggttttttgtttttttgtaagttaataatttattgatttatttttgttgtatggaaatgggtattttgtaaatgtgcgtggtatttgttttagagttgtgttgttatatttatgagagtagagtagcgggtgggtcgtgatgatatatttaggttgtagagttttagttttgttattttttatttgtgtacgtttgaagtagttgtattattttttgtattttttttttattatttgtaaaatgggggtgtgaggttgtttatttcgtacgtttatcgtgaagatttaatgagattattattcgtttagtgataatatagtggttggtattagtcgtatttataagtaattattattgttattgtcgttatcgttattattaaagagatgaaggagtttttttaaaaaatgtgttgtttgggagaattaggagtgtttttttttcgacgtttgttttttttttgttgttatgaattttttttaattatagtagttttttttaaaaatagaagttttttttttttagaaaagtttatgtgggaaaaattaggtagtttgtttgttggtttgttcgtttttttgtatttttgtaataaatgtttattgggtgtttatttattttagttattatgttgtatgtcgggtatttatagttgtatgagttattttgggggtttatattttggggacggagataataacgttagtaaatgtatttagtatagagtggggagcgtagcgacgaagaatgaatagggtttcgtgaggttttaaatattcgtttcggtggtaggaaagtttataaaaaatttaaatttttggattttattttaggatgggtgatttagttattagtaggagttttttagaattattttggaaaaatttaaattaatgatttttatttagggataggtattttgcgagataagagggagattttttagaattgagattttagtttttttattttatcgtttttttttttggttcgttgagaatttaggtattagtagtttagttttgtatttttgtattttgttggtaggcgtagttatttttaattaatgagtttttagagttttttatgttatttattattttatttttattttgtaatagtttagttttttattgtgaatttttttttttatttttaaaatatttatatttttatttagtttttgaaattttaattatatatatttatagttattattttaaatggtatttgttttatttggtttaattttatttcgtttaaggtttaagaaagtacgttttcgttttggtattttaggatttgtgttaaagtttagatttatttttattttgatggtattttagaggaaatttgtttttttttcgttatcgtttttaatttttttattatggtaatatttattttttttttttttggtaataatattttaattttttttttgagaaattattatatttttagtttagtaggtggtgttgattttattttttgttttagaggtagtttgtggtttaggtatgataaatcgtattattgtattggtttagggatgatttatttttagagttaatgagatgtaatgttattttttattgggattgttgaaagagatgtatttttttttttttattggatttgaaattggagaaaaaaggttggagttattgtagttattatgttttattaagggagaagttgtttgaggataaggttaatgtagaaggttgtggaataaaagtagagtgagagtttagtgtagtggtatacgtatgtgtagttttagttattaggaaggttaaggtaggaaggttgtttgagtttaggaatttaaggttatagtgtgttatgattatttttgtgaatattttattgtattttagtttgggtaatgtagtaagattttgtttttaaaaaaaaaaaatggtagagtgaaatttgaatttattggtatgggtttagatgttttatttttattatatgagtcgatatatttttattttgtttaaggtgtttaggttgagttttttgaagttgtagttgaatattttatgaagtatttttttatatagtatcgtatttaatgtttgtaatattttttgtggggtggatattaatttggtaattttgtttataagaaaataaagtttagtaagaaaaggtaatggattttaggttggagaggtagaaaatggtaaagttaagatttaattttaggattttgatttttaagtttggatttttaattattatgttttattattatttaatttaatgagaagatgaaaataaagttagaaataagtaatagaggagttagaggagtttatattttatagtgatttttgtaatattagtgattgttatgtaagcgagatattgaataattgattttttattttttttatatttgttaatgtataatatattggaaagttaaatgagtattgttaagtattagttttaggaagtgcgttgaaaagtattttttttacgtggaagagttttttgttagagaattttgtatatttcgtataggaatgttagttgtaaatagttttttttttatgtgtatagaaaattgatagatttaaattttattaggaaatagagtggttattttgagaaaatttttgaaaataattaaggttttaggttaatttttttagaaagttaggttttgtgtgattattatttatttaattagattattttaaatatatttgaaaaattaatagtatgtttcgtttgtttagggtttttttagaagtttttcggggaattaaagtaaaattagggaattgtatagtataattttgaattttataattttatttagaaatatttggttaataggaaaaagtggatttttattggtagggtgcgtaggaagaaaagaagtattatttttattatgaataggaataaaataatgggttagatatagtggtttatatttgtaatcgtagtaatttgggaggttgaagtaggaagattatttgaggtaagattagtttaggtattatgcgagatttttatttttataaaatattttaaaaaattaattaggtgtggtggtatatgtttgtggtttaaattattgaggaggttgaggtgggaggatagtttgagtttaggaggttgaggtggtcgtaagttatgattgtattattgcgttttagtttgggtgatagagtaaaattttgttttaaataaaggaaagaaaataattacgtttaatatttattaagagtttttgttgtattaggaatgggtattttttatgtgtatttttttatttgtattattagtgttgttttttagtgaagaggggatattgtatgttgttttatgttttattttggtacgtttgtttttattgtcgatatgttaatttttttttttaaatgttggtataatgtgtatgaaggagaaggtaatgaatattagtaagaattagtaattttttaattaattatatatgaggttatatgaagagaataattaatagtagaatatagaagaaatgttttttttgattcgaaggtgagtgtgtgtaaaatatttatttaggaaaatattagagttaaatttttttatattgagttttttatgaattttgattttttttttagttttattttttgttttatgtttgtgagaaaatttgggttaattttggtttgttagagggaaataagatagtttggtttaggtatatttagggatgtcgataataataataataaaagagtagtgttataatttaaaagtaaatttaatttaatgtttatttttttaaaataatgttatggtatattttatttgggggaaaaaaaggagatttttttagtttattttttaattatatttatttattaaatatttagtgggtttaatagttatatgtgttttagtttttatttttttttttttaagaagttaaaaagtttgatatttgtttttttagaattttttttatttggtattggttatgtgatttagtatatagtttatgagatataatttgatgtgtttttgggaaaagttttttttttttttataaaaggtagaaatggttagtgttttttttttttttttgtttaaaatgtgggtgtgatgtttggtaatatggtagttattttggatttatgtaatgataagaatgagaatataaggttaatatgtttaggatggtaaaagggaaagatggaaagaattttggtttttaaagattttattgaatattttaattaatatttgtatagttttaatttttttgtaatagaagaaaattagttttaatatattttattattagtgggtttttgttattagtagttaaatttatgtttagttgatgtaattatgtgttagattttatattgggtattatgattatgaagatatggaaattatagttttaatttaaggggtttatagtttatttggagagatatatgtgtaagggattatagaatttttttagtgttatatttttattttgtaggtggaaattaagatttaattgattattttagtgttatttttattagatgtagaggaagaatttgaagtttttaggttgttgatttttaattttattagttttaaggttttattgattatttttttatttgtttttttgtttatttcgttatatatatattttgtaattttattatgagaaagaagtattttttttattttgaaagttagtttggtttagttttttttttttatatttttagaatgaataaattaatagaaaagatgggcggaagttttttaaggagttgtgtaaaatgtatagatattgttattgttatatgtagaaaatagaatttgaggatagaggtgagatagattatttttggaattttagaaaattgatgttagaaggaaatgtagagggaagagagatttttttgatttagagtttattttagaaaaataattaggaattttaaatgttgatagggttgataggatttaaaaagaggttttagatttaaggtttagggaagaaaatagggtagtcgttatgtgttttatttagaaatgaatttagaatggttttggttaatttttagggatgattttaaatgaagtgggttatagtttttattatagtttttaaattattattatttattagggttatttaaagaggagtagttataggagaattagtatttggaagattagaagattttgtgttatagttgtagtagtatattttgaattttattttatagaatattggagtaattatataaagtagtttatttttttatagtgtttttgggttatggtttagttgtgtagattttattttgtttttttagagaaaatagagggaatgcggttgagttttaagatattttttgtatagtggggatgtattatagatttagtatttttttatttaaaagttttaaaatttaaaattttttgagtattaatatgagataatgatatttttgttttttgatggtttaatgtatataaattttgttttatgtataaaattattttttaaattgtataaaattagttttatgttatgtgttttaaatatatataaagtataaataaattttatatttagatttgtgttttatttttaagatattttattatgtatgtgaaaatatttttaaatttgaaaaaatttaaaattcgaaataattttggttttaagtattttgggtaagggatatttaatttgtacgagttgttggtagttttagtttgggattaaggtatgaatttttagaatattttttttaatttttgtttattttagtagaagaaatttatta

SEQ ID NO: 125 - DNA, 5307 bp, Artificial Sequence
  chemically treated genomic DNA (Homo sapiens)
gtattttgtttagtttatttttttttttggtttttttggttttagttgttgatttttttacgagggtggatttttttagttatggtttggtgattagttttttttgtattttttttttagttcggttgttttaaattttttatttatagttttttcggtttggtatttgtaaggtaagaaggggagggcgtgttttttttgataatttgtttttttttattggttgttttagttgttttgtttgaatattttacgtgttatattttgttttttttttttttttatttattttattttttaaatttttttgtttttttttttttgtattttagatttttttgattttttgttttttatttttttgtagataagtgtggttatataatgcgatttagaagagattatcgtgtttttagattttgattagttgtttttttttttttttgtttttagaatgttttgggataatatttggaggaaggtgggaagtagatgattgaggaagggatggattaagttaatttttttttggtggtgtttttttaaaaaaaaaaaaaagtttaagttttatatagaaatattaataaataataaagttttttttttattgtattattgttttttttttgtttttttattgttatagattggtattagttgtttttttgtttagggttagtttagtattttcggggtagtttcgttttgttttttttagtttggtttttttttttttttttttttttttgtttcgttgtgtcgtttaggttagggtgtagtggtgagattatagtttattgtagtttggattttttagttttaagcgataatgttttagtttttcgagtagtcgggattataggcgcgtgttattatgtttggttaatttttgtttttgttgtttgtattttttgtagagacggggtttcgttacgttgtttaggtagtatttttttttttttttaagtgttttagtcgttttaacgtattttatttttttatttcgtgtagtaggagtgagaaagttaatgaggggtcgatttaaggttatttagttaatttaggttcggagaaagggggcggggttttagtgggattgtaaggagttaggaagagggcgattagattttattaattagttaatggttatagtttagaggcggagtttggggaacgatatttggatttatcgttaatgggaaaaggtaggtttatagttttaaaggggaataaatgtttcggtcgaattaagttttgagtttttagcggaggaggggatttgattttttaaggtggaatgtggcgatgtttttttaaaggtaaagtggtcgagtcggtcgagtattgtttagcggtacgggcggggtgttcggttgtgtttttaaaggcggaggggcgggaggcggagcggaggcggagggcggagggagtcggcgtaagatggcggcgggaggggtttaggttgttgttttggtcgtcgagtgaggggcggggggggttcgggggcgcgcggttcggtaagcggggacgcgcgaggttggggggcgtttttcgggtgggagaagaggtcgaggtagcgtttggggcggagcgggggggggcggggttcgttgtgggcggaggtagataaggggcggggtcgaaaggttcgatagtgggcggggtacggggggggtgggtttggaaaggggcggggttagagaagttggggcgaaagggggcgtggtcggcgagagagtttggggggtatagtttgaggggagatggagtaagcgttggtttttagtagtagagttgttttgtttttttttaaaaagtgggtgtaaaatattaaaaaggtagattttggaatgttaggtttttaggtaagtcggaaatagggtataatttcgaaggaagttattttagtttttaagagtattttatttttttaatttttaaggaaagggtataagatttgttagatatttgtgtttgttggcgttgttatttgttgtgtgattttggataattttttaatttttttgagttttagtttttttatttgttaaatggggttgagaggaatatttattttattgttgtggggagttatatagataatgagcgtgaatatatttttgagttgtaacgggttgtgtcgttatgagatgttattattatttttttttttttttttttttagagattttttcggtcgttttttttttttttttgtttttgtggttgggggggtattttttttttttataatatggagttattttttttgttttttagtggggtagtattttttttgtcgttgtcgttggtttcgtttttattatttttgttagtagttgtagtggtatatgtgtttttttttgaggtgattagtgtttttttggagttttttaattagtagcgtttgtagggttagttttgcgatgtatttattagagtgtagggtcgggagtttcgggtttatcgggttgttttggttgttttttttttttatttttatgattaggttttatttaaaggtatgatttttatttcgttgtttagtgttatggatttaggcgtttttgagattgttttagttttcgtttatattggtcgttttagtatggttgttgttgatattgttaatttttttatagtggggtttgtgttttaaatgtggtatattgtggataagtgtattgaattatttcgagaaggtcgggttttagttattattattattattattgttgtagttatttttgttattgtttttggtgttggggtgttattcgggagtgggggtattgtggtttttgttattatgggttttgcgcgtttttatgtttttagtcgggttagtgagaattaattttttagtagtagtaattattttagttttagggagtttattgattttttattttttttttaagaggtatttgtagtttttgtagtgggtagtggggagcgtcgaggaggtggttttgtatttttagtttttgtcgttggtagtggaggggttatatttggaaagttgttgttggaggtagatgagttgtgcgatgatggtggggatgggaggggggtagtggtttttggggttgggtttcggagatttatttatatattttttagtattatgttatagaaatattgggtatacgtgaagcgaggtggtaattgtttagcgttaatatttttggttttttaagatttagatttggaggaggaagaggaggaggaagatttggtgttgatttgtgaggatgatgaagatgaagaattagggggtagttttagggttttagtggggggagggtttgaggttatttttagtataagtgatgttcgtattttgagtgagtttttagataagggggaggagtaggttaatttttgtgagttttttaatgattttggtttatatgagggtgggggttttgtggtaggttttgatgatttaggggggttaattttttttttttatgtttttttttatttttttcgatcgtttttttttttggatatgtagggtaattagattttggttttttcgtcgtcgtttttatttttatttttataggtttttggttaattattagggaattaagtagaatacggggtagtgatcgtggggggtacgtcggtggggagtttgggtgtgtcgggtagcgttggtggggtttttggagggattggtagtggggacgggaataagatttttttgtgttattgtgggaaggtttttttttataagagtatgcgggatcggtacgtgaatatgtattttaatttgcggtcgtttgattgtttcgtgtgtaataaaaagtttaagatgaagtattatttgattgagtatatgaagacgtatataggttttaagttttacgagtgcggagtttgcgttaagaagtttatgtggcgagatagttttatgcgttatcgaggatattgtgagcgtcggtatcgtttgggcggggtcggggtcgtatttgggtttgggatttttacggggttatttttgtcgtttaagagagagtttttcggagtgggcgggggtagcggcgacgaagcgagtgcggttacgttttcgtttagtagacgtgtttggtttttatttagagtttataaggtggagatgggtttcggtggaggtggaggagtaaattgaaggggtaggttattggggtggggtagttttcgggaaagggaataaggagtacgatgtaagggcgttgtggttttcgggtgattttttattatatttattgtttttttttatttttgtggatttgtatatattttggaaggggaattatagttttattatcgttcgtttattttattatttaattttttttttttaaggtatttttagaattaaattttttttttttttttgatgggtatattgaagtttttgttttatagagtagattgtatatggagggagggagagggggcgtgttgaatattttgtagttatagggttaggggttaggtggttgtagtttgtgtttgaagtttgtgtttgtgttgtcgtggagataaggtttttgagttttatttttgttttagaatttatttttttttaaggatgcgttttttatttttattttgttttttttcgttattttcgatttttcgtggaaatttttaattcggtttttatggaggagtgggtggagataaggagggagtaagtcgtaggagtataaggtttttattttttttaatagtgattaaaatatttattggttatttatttggtttttcgataattcgtgtgtttgttggggacgcggtatagatagggggaagtcggagtaatggttttcgggtaagtggatgttggagagtatatataggagttggggggcgggggagggtttggggttggggagggttcgaattcggggttgttgggtagtttaggagggcgcggtaaggttggggtgttttggtgagaattggagaggatttattcgggtttttgtttggttagtggggaaatatcggttttttaggtatttttatttaattagagcggggatttttatcgttttttatgtcgttttttggaggaaagtgaaagtgaaaggaggaagaggaggttttatggttgaggaggtcgtagcgttatgaagtttttgtttttgtttttcgttgtggttttgggtgagcgaatttcgcgatttatcgtttaagaattagagggaagcggagggaggtggttttattggagtcgatgttagggtgggagtggggtaggttattagatatataaatcgttttttattcgcgtttttatacgttagg

SEQ ID NO: 126 - DNA, 5307 bp, Artificial Sequence
  chemically treated genomic DNA (Homo sapiens)
tttggcgtatagggacgcgagtgaggagcggtttgtatgtttggtgatttgttttatttttattttggtatcggttttagtggggttattttttttcgtttttttttagtttttgggcgatgagtcgcggggttcgtttatttaaagttatagcgaggagtagagatagggattttatggcgttgcgatttttttagttatgaagttttttttttttttttttatttttatttttttttaaagggcggtatgaggggcggtggaaattttcgttttggttaggtgaaggtgtttgggggatcggtgtttttttattggttaggtagggattcgggtagattttttttagtttttattaggatattttagttttatcgcgtttttttggattatttagtagtttcgagttcgagttttttttaattttaggttttttttcgttttttaatttttgtgtgtgttttttaatatttatttgttcgaaaattattatttcggtttttttttatttgtgtcgcgtttttagtaaatatacgggttatcgggaagttaagtaaatgattaataaatattttaattattgttaaaaaaaataaaaattttgtatttttacgatttattttttttttgtttttatttatttttttatgagaatcgagttgggaatttttacgggaagtcgggggtggcggggagagatagggtagaaataaagagcgtatttttgagagggggtaggttttaggataagggtggggtttaaaggttttgtttttacgataatataaatatagattttaggtatagattataattatttgatttttgattttgtgattgtaggatgtttaatacgttttttttttttttttttatgtgtaatttattttgtggagtaggggttttagtgtatttattagagggaaaggaagggtttagttttggaaatattttgggggggaggggttgagtagtagaatgggcgggcgatggtgaaattgtggttttttttttagaatatatataagtttatagagataaaggaagatagtaagtgtggtgggagattattcgggggttatagcgtttttgtatcgtgttttttattttttttttcgaaagttattttattttagtagtttgtttttttagtttgtttttttatttttatcgaagtttatttttattttgtggattttgggtggggattagatacgtttgttggacgggggcgtggtcgtattcgtttcgtcgtcgttgttttcgtttatttcgggagatttttttttggacggtaaggatggtttcgtgggagttttaggtttaggtacggtttcgatttcgtttaggcggtgtcggcgtttatagtgttttcggtggcgtatgaagttgtttcgttatatgaattttttggcgtagatttcgtattcgtagggtttgagatttgtgtgcgtttttatgtgtttagttagatggtgttttattttgaattttttgttgtatacggggtagttaaacggtcgtagattgaggtgtatgtttacgtgtcggtttcgtatgtttttgtgggagaaggtttttttataatggtatagaaagattttattttcgtttttattgttagtttttttagggattttattaacgttattcggtatatttaggttttttatcgacgtgttttttacggttattgtttcgtgttttgtttggttttttggtggttggttaggagtttgtgaggatgaggatgaagacgacgacgggaagattaggatttggttgttttgtatgtttaagggaaggagcggtcgaggagggtgggagggggtataggaagagggagttggtttttttgagttattaagatttgttataggatttttatttttatatgggttaaagttattggaggatttatagaagttgatttgttttttttttttgtttgggggtttatttagggtacggatattatttatgttgagggtagttttaggttttttttttattggaattttggagttattttttagttttttatttttattatttttataggttaatattagattttttttttttttttttttttttagatttgggttttggggaattaggggtgttggcgttgggtaattattatttcgttttacgtatatttagtgtttttgtggtatgatgttagggggtgtgtaggtgggttttcggagtttagttttaggaattattgttttttttttatttttattattatcgtatagtttatttgtttttagtagtagttttttagatgtggtttttttattgttaacgataggggttgggaatatagggttattttttcgacgttttttattgtttattgtagaagttgtaaatgttttttgggaggaagatgagaaattagtggattttttggggttgaagtagttgttgttgttgggagattgatttttattggttcggttggaggtatgggagcgcgtagagtttatggtagtaggggttatagtgtttttattttcggatggtattttagtattagggatagtgatagaggtggttgtagtagtagtgatggtggtggtagttgaggttcggttttttcggagtagtttagtgtatttgtttataatgtgttatatttggagtatagattttattgtaaggaagttgataatgttagtagtagttatgttgaggcggttagtgtaagcggaggttaggatagttttaaaggcgtttgggtttatgatattgggtagcgagatggaggttatgtttttgagtaggatttgattatggaagtaaggggaggaggtagttaggatagttcgatgagttcggaattttcggttttgtattttgatagatatatcgtagagttggttttgtagacgttgttgattgagggattttaagagggtattggttattttagggaaggatatatgtattattgtagttgttggtaggggtagtgggggcggagttagcgatagcggtaggggaagtgttgttttattgggagatagaggagatggttttatgttgtggagggaggggatatttttttagttataggaataaagaaaggaggagggcggtcgggggggtttttgggaagaaaaagagaaaagaataatgataatattttataacgatatagttcgttataatttaaaaatatgtttacgtttattatttgtgtaattttttataatagtgaggtaggtattttttttaattttatttgatagatgaggaaattaaagtttagaaagattaagagattatttaaggttatatagtaagtggtagcgttagtaaatataggtatttgataaattttgtgttttttttttggaggttagagaaataaggtgtttttaggggttggagtggtttttttcggaattatattttattttcgatttatttgagagtttgatattttaaaatttatttttttggtgttttgtatttattttttgggagggggtagggtagttttgttattgaaaattaacgtttgttttatttttttttaggttatgttttttaagttttttcgtcgattacgttttttttcgttttagtttttttagtttcgtttttttttaggtttatttttttcgtgtttcgtttattatcgggtttttcgatttcgttttttgtttattttcgtttataacggatttcgttttttttcgtttcgttttaagcgttatttcggtttttttttttattcggaaggcgttttttaatttcgcgcgttttcgtttatcgggtcgcgcgttttcgggtttttttcgttttttattcggcggttagagtagtaatttgggtttttttcgtcgttattttgcgtcgatttttttcgtttttcgttttcgtttcgtttttcgttttttcgtttttaaaggtatagtcgggtatttcgttcgtgtcgttgggtaatattcggtcgattcggttattttgtttttaaagaaatatcgttatattttattttaaaagattaggttttttttttcgttgggagtttaggatttggttcggtcgaagtatttatttttttttaaagttataagtttgtttttttttattggcgatgggtttaggtatcgttttttaggtttcgtttttgagttgtgattattagttggttggtgggatttaatcgttttttttttagttttttatagttttattgaagtttcgtttttttttttcgggtttggattggttaaataattttgagtcggttttttattggtttttttatttttattgtacgaagtgaaaaagtaaagtgcgttaaggcggttgaagtatttaaaaaaaaaaaaaagtattgtttgaataacgtggcgaaatttcgtttttataaaaaatataaataataaaaataaaaattagttaggtatggtggtacgcgtttgtagtttcggttattcgggaggttgaggtattatcgtttgagattgggaggtttaggttgtagtgagttgtgattttattattgtattttggtttgggcgatatagcgagataaaaaaaaaaaaaaaaaaaaaaaggttaggttagaaaggatagagcgggattatttcggggatattgggttaattttgagtaaggggatagttaatgttaatttgtaatagtagaaggataagaaaaagatagtgatatagtaagaaaagaattttattgtttattaatgtttttgtgtaaaatttaagtttttttttttttttaaagaaatattattaaaaggggattagtttagtttattttttttttagttatttgttttttatttttttttaaatgttattttagaatattttggaggtagggagaaggggaggtagttaattagagtttgagagtacgatgattttttttggatcgtattgtgtggttatatttgtttgtagggaagtgagagataaagagttaaagagatttggagtataggagaaaagaaataggaggatttagaggataaaatgggtgggaaaaaggaagagataggatgtggtacgtggaatatttagatagagtagttgaaatagttaatgaaagagaataaattgttagaggaaatacgtttttttttttttattttgtaagtattaggtcgaggaggttgtgaatggggggtttgggatagtcgggttggagaagggatgtagagggagttggttattaggttatggttgggagagtttattttcgtggaggaattagtaattggggttaaggaagttaagggggaaggtgggttgggtagggtat

SEQ ID NO: 127 - DNA, 5134 bp, Artificial Sequence
  chemically treated genomic DNA (Homo sapiens)
  unsure (30, 33, 37, 42, 45, 47, 49, 53, 56..57, 315, 422, 1807, 2267)
  unsure (2611, 2623, 2734, 2746, 2763, 2782, 3189, 3733, 4673)
ttttttttttttttttacgcggattttgantgntagngtcgnatngngngggnaannaatgtttcgtgtttgttttaaaatgcgttttgtgttgtggggtgcgttttttgtggcggttttttcggtagttgagttaggagaattttttggattcgggaagtagaggttgtagtgagttgagatcgcgttattgtattttagtttgggtaatagagtaagatttagttttaaaaaaaaatgtggttttattgtttttttttttttttgggatagggttttattgttatttaggttggtatgtaatgatgtaatttntagtttattgtaatttttgttttttaggttgaagtaatttttatgttttaggttttcgagtagttggaattataggtgtttagttaatttttgtatttttttgtagnagatagggttttgtcgtgttggggaggttggttttgaatttttggttttaagtgatatatttgtttcggttttttaaagtattgttttttaggaatagtgatcgtattttatatttagtagcggatggggaacgtttttttgtttattttatttttttatgttaattataggggggggttttacgggtttgggtatggatggttgagtaagaaaggttaggtttggtcgattgagtcgtggatttttttcggattttttttgtttttagtagtttttgtagtaaggggttttgggtatttgtttttgagtagggaggtttataaagtgtttggtgtttgggaaatgtttttcgaggtttaggtggtgtagtatagtttttttttatttttagtattttgaattattggtatatgtttaaggatatttaatgcggttacggggaggttatattagtatttttaatttttatttgtgagtaggtttttaaggttttttttgtttttagtcggataatttatcggttgggatagtattgattttttagtttttgtagggtataaatatgaggtttcgtaagatttttttttttaatagagtgtgtttttttttttcgtttatgttcggttgtttttttttgttttagaagttttcgttttagtattttagggtttttaagatgtttttagatttatggtttagaggtatattagcgatcgttgtgtttttagttagttggtagttttaaggggagatgaggttttttaaacgaatttagttaatgttattatgggtattatttttatagtagttacgattaggggaggttaggtggttcggtggtttacgtttgtaattttagtattttgggagtttgaggtaggtggattatttgaagttagaagtttgagattagtttggttaatatggtaaaattttatttttattgaaaataaaaattagtcgagcgtggtggtgtgtatttgtaattttagttatttgggaggttgaggtaggagaattgtttaagtttgggaggtggaggttgtagtgagtcgagatcgtattattgtattttagtttagcgatagagtaagattttattttaaaaaaattaaaaaaggaggagttgatttgcgttgagagggtgcgattttgattataggaggttattgtatagttaaaggtatagaggtgaggaggaaggaatgaaaggttagtttgtaaatgttggtaggttttatggttgatatatagaggtgaggttgggaggttgggttggaggaggaggggcggtgaatgtcgggttaatatttttatattttatgtagaaagtaataaggaattattttgaggtagtttggagaattaaaaaaagaaaaaaaanaaatagaggttgggcgcggtggtttacgtttgtaattttagtattttgggaggcggaggcgggattacgaggttaggagtttaagattagtttgattaatatgatgaaattttatttttattaaaaatataaaaattaattaggtatggtgacgcgcgtttgtaattttagttatttaggaggttgaagtaggagaatagtttgaattagggaggtagaggttgtagtgagtcgggattatgttattgtattttagtttgggcgatagagtgagattttattttaaaaaaaaaaaaaaaaaaattaatagaaaatgttggatacggtggttttcgtttgtaattttagtattttgggaggttaagataggtagattatttgagtttaggagttttagattagtttgggtaatatggcgaaatattatttttacgaaaaatatgaaaaattaatcgggtantggtggtggatatttgtagttttagttattcgggaggttaaggtaggagaatcgtttgagtttaggaagtagagattgtagtgagttaagattgcgttattgtattttagtttgagagagtaaaattttgttttaaaaaaaaaaaaataaaatattgggcgtggtggtttatatttgtaattttagtattttgggaggttgaggcgggtgaattatttgaggttaggagttcgagattattttggttaatatggtgaaatttcgtttttattaaaaatataaaaattagttgggtatggtggcgggcgttcgtaattttagttattcgggaggttgaggtaggnagaatcgttggnaattcgggaggtggaggttgtagcgagttgagattttattattgtattttagtttgggtgataatagcgagattttattttaaaaaaaaaaaaaaaaaaaagtaataaggnaattagattttngaagaaagggtttaaanattattatgagaaatgggnaagttagggtagttttatggtaaggtttgaggttaaatgttatttgattttttttatttatttattgttttatttttaataagttatttagtttttgagatttagttttttgattggtagaaggtatttatttaggttcggtatagtggtttatatttgtaattttagtattttgggaggtcgaggcgggtggattatttgaggttaggagtttaagattagtttgtttaatatggcgaaattttatttttattaaaaatataaaaattggttaggcgtagtggtttatgtttgtaaatttagtattttgggaggttaaggggggcggattatgaggttaggagttggagattattttggttaatatagtgaaattttatttttattaaaaatataaaaaaattagntcgggtatggttgcgggcgtatgtagttttagttatttaggaggttgaggtcggagaatggcgtgaattttggaagaagaggttgtagtgagtttagatcgcgttattgtattttagtttgggcgatagagcgagattttgttttaaaagaaaaaaaaaaaaaattagttaggtatgtagtattagttatagtgtgtttgtaattttagttattcgggaggttgaggtaggagaattatttgaattcgggaggtagaggttgtagtgagtcgagattatgttattgtattttagtttgggtgattgagcgagattgtgttttaaaaaaagaaggtatgtatttaaattataaggttaaaagagataaagtatgcgagtaaaataaagtaagttagttagtgtgggttgttttttttttttagtgaaggagttttttgttagaggtttttggatttgtttaatttgtatttggaaaggttattatttgtaggatttttatagttatatttggtatattttgtgattattattattatttttgttngttattatttatgattatgattatataatgggttttttttttttttttttttttttttttgagttatcgtattcggtttgtatgtttttaatttttataattttaatgtaaatattagttgttttgaattttttagtttgtgttatataagtatagatttaaaaatattgtgtaattttagattaaggtttagaattttgttttttaattttttgcgggtttatggatttttttttttttttttttttttttttttgagattaagttttggtttatcgtttaattttttaggttggagtataaatggtatgatttcgggttattgtaatttttattttttgggtttaagcgatttttttgttttagtttttttagtagttgggattatagaggtatattattacgttcggttaatttttgtatttttagtagaaacggggttttattatgttggttaggttggtttcgaatttttgatttcgtgattcgttaaaagtgttaggattataggtgtgagtcgttacgtttggtagggtttacggatattattagtatagttaggattttaattttttttattttgaaaattaggttaataaaaatttttaggagaaggtaaaatatattatggtgtttaagtattggggatttggtacgtattaggcgttttgtatgtttataggagtgttttagacggtttttaagttttttttttggaattttaatttaataaatgagttaatttcgttttagttttttagtttttttttgtaatttatttatttttgtagatattttgttttaaggaattttgtttgggaaatttatattagatatatttattatggcgtttatagtcgtatgggcgtgcgtttttttgtttatatggttagagtttcgtttcgtttcgtttttttaaatttggtgggcggatcgaggncggggttttatattaggttttatttcgattagttacgtttatcgttttgatttttaggtttttttagtttttgggcgtacgtgtcggattttttttacgagggggcgggttgcggttaaatttttcgttaggttagcggtcgggcgttgattggttttatggcggcggggtcggttcgtgattggttagtacgtcgtggtttaaagcggtcggcgcgggaattaggggtttattgcgggacggttttggagagtattcgggttcgtgaatttttcggaggcgtaatgagttgtattaatttgtttattgtgttgtttggtttttttagtaagattcgggggtagatttaggtgcgggggttagttttgcgcgtggttggggatgaggtggtcgtggtgatagtttgtgtttacgtattcgcgtagggcgggtttttaaatgattttatttttttttttagg

SEQ ID NO: 128 - DNA, 5134 bp, Artificial Sequence
  chemically treated genomic DNA (Homo sapiens)
  unsure (462, 1402, 1946, 2353, 2372, 2389, 2401, 2512, 2524, 2868)
  unsure (3328, 4713, 4820, 5078..5079, 5082, 5086, 5088, 5090, 5093)
  unsure (5098, 5102, 5105)
tttagaggagagggtgaggttatttgagggttcgttttgcgcggatgcgtggatataggttattattacgattattttatttttagttacgcgtagggttggttttcgtatttggatttgttttcgggttttgttgggggagttaggtagtatagtgggtaggttaatgtagtttattgcgttttcgggaagtttacgaattcgagtattttttaaggtcgtttcgtagtaagtttttggttttcgcgtcgatcgttttaaattacggcgtgttggttaattacgagtcggtttcgtcgttatggggttaattagcgttcggtcgttgatttggcgggagatttggtcgtagttcgttttttcgtgggaggaattcggtacgtgcgtttagggattgggagggtttggaaattagggcgatggacgtggttgatcggggtggggtttggtatgaagtttcgntttcggttcgtttattaagtttaaaggggcggagcgaggcggggttttggttatataaatagagggacgtacgtttatgcggttgtagacgttatgatggatgtgtttggtgtgggttttttaagtaaggttttttggaataagatgtttgtagaggtaggtggattgtagggagggattaaggggttggggcggagttagtttatttattagattggaattttaagaaggaagtttagaagtcgtttagagtatttttgtgggtatgtagagcgtttagtgcgtgttaggtttttagtgtttgagtattatggtgtattttatttttttttaaggatttttgttaatttggtttttaggataaagaaaattgaagttttgattatgttaataatattcgtagattttgttaggcgtggcggtttatatttgtaattttagtatttttggcggattacgaggttaggagttcgagattagtttggttaatatggtgaaatttcgtttttattaaaaatataaaaattagtcgggcgtggtgatgtatttttgtaattttagttattggggaggttgagataggagaatcgtttgaatttagaaggtggaggttgtagtgattcgagattatgttatttgtattttagtttggaaggttgggcgatagattaagatttagttttaaaaaaaaaaaaaaaaaaaaaaaaaaaaatttatagattcgtaggaggttaggggataaagttttggattttgatttgaggttatataatgtttttgggtttgtgtttatgtggtataggttgaaggatttagaatagttggtatttatattggggttgtgaaggttagaaatatataggtcgggtgcggtggtttaaaaaaaaaaagaaagaaagaaaagaaatttattgtataattatgattataaataatagtnaataaagatggtggtagtgattatagagtgtgttaggtgtggttgtaaggattttataggtaataatttttttaggtatagattggatagatttaaggatttttgataaagagtttttttattgggaggaagaagtaatttatattgattggtttgttttattttattcgtatgttttattttttttaattttgtgatttggatatatgttttttttttttgagatatagtttcgtttagttatttaggttggagtgtagtggtatgatttcggtttattgtaatttttatttttcgggtttaagtgatttttttgttttagtttttcgagtggttgggattataggtatattgtagttggtattatatgtttggttaatttttttttttttttttttgagatagagtttcgttttatcgtttaggttggagtgtagtggcgcgatttgggtttattgtaatttttttttttagggtttacgttatttttcggttttagttttttgagtagttgggattatatgcgttcgtaattatgttcggnttaatttttttgtatttttagtagagatggggttttattgtgttagttaggatggtttttaatttttgattttatgattcgttttttttggttttttaaagtgttgggtttataggtatgagttattgcgtttggttaatttttgtatttttaatagagatggggtttcgttatgttggatagattggttttgaatttttggttttaagtgatttattcgtttcggttttttaaagtgttgagattataggtgtgagttattgtgtcgggtttggatagatattttttattagttaggaaattgaattttagagattaagtaatttgttgaggataaaatagtaagtaagtgagggaggttagatggtatttgattttaggttttgttatgaggttgttttgatttntttattttttatgatggtntttgagttttttttttnaaaatttggttnttttgttatttttttttttttttttttttgagatggagtttcgttgttgttatttaggttagagtgtaatggtgggattttagttcgttgtaatttttatttttcgagttnttagcgattttntttgttttagtttttcgagtagttgagattacgggcgttcgttattatgtttagttaatttttgtatttttagtagagacggagttttattatgttggttaggatggtttcgaatttttgattttaggtgatttattcgttttagttttttaaagtgttgggattataggtgtgagttattacgtttagtgttttgtttttttttttttgaaatagggttttgtttttttaggttggagtgtaatggcgtaattttggtttattataatttttgttttttgggtttaagcgatttttttgttttagtttttcgaatagttaggattataggtgtttattattantgttcggttgattttttatatttttcgtagagatagtgtttcgttatattgtttagattggtttggaatttttggatttaagtgatttgtttattttggttttttaaagtgttgggattataggcgagagttatcgtgtttagtattttttgttggtttttttttttttttttttgagatggggttttattttgtcgtttaggttggagtgtagtagtatgatttcggtttattgtaatttttgtttttttggtttaagttatttttttgttttagttttttgagtagttgggattataggcgcgcgttattatgtttggttaatttttgtatttttagtagaaatggggttttattatgttggttaggttgattttgaatttttgatttcgtgatttcgttttcgttttttaaagtgttgggattataggcgtgagttatcgcgtttagtttttgtttnttttttttttttttttaattttttaaattgttttagaatggttttttgttattttttgtataaagtgtgaaggtgttagttcgatatttatcgtttttttttttttagtttagttttttagttttatttttgtgtgttagttatagggtttgttagtatttgtaaattgattttttatttttttttttttatttttgtgtttttgattgtgtagtgattttttgtggttagaatcgtatttttttagcgtagattagtttttttttttttaatttttttgaggtagagttttgttttgtcgttaggttggagtgtagtggtgcgatttcggtttattgtaatttttattttttaggtttaagtaatttttttgttttagttttttaagtagttgggattataggtgtatattattacgttcggttagtttttgtttttagtagagatggggttttgttatgttggttaggttggttttaaatttttgattttaagtgatttatttgttttaggtttttaaagtgttaggattataggcgtgagttatcgggttatttggttttttttggtcgtaattgttgtgggagtggtgtttatgatggtattaattgaattcgtttgggggattttatttttttttaaggttgttagttggttaaaggtatagcggtcgttggtatatttttagattatggatttgagggtattttggagattttgggatattggggcgagggtttttaaggtagagaggagtagtcgggtatgggcgagggggaggggtatattttgttgagaaggaaagttttacggagttttatgtttgtgttttgtaggagttggagaattagtattgttttagtcgatgggttgttcgattgggagtagaggaagttttgaggatttatttatagataggaattgaaggtattagtgtgattttttcgtggtcgtattgggtgtttttaagtatgtgttagtgatttagaatgttgggggtgggggggggttgtgttgtattatttgggtttcgaggggtattttttaaatattaggtattttataaatttttttgtttaggggtaggtgtttaggattttttgttgtagggattattggaggtaggagaggttcgggggaggtttacggtttagtcgattaggtttggttttttttgtttagttatttatatttaggttcgtaaggtttttttttgtggttggtatagggaggtgaagtgaatagaggaacgttttttattcgttgttgaatgtggaatgcggttattatttttaaaaagtaatattttgggaggtcgaggtaggtatattatttgaggttaggagtttaagattagtttttttaatacggtaaaattttatttnttataaaaaaatataaaaattagttggatatttgtaattttagttattcgggaatttgaggtatgagaattgttttaatttgggaggtagaggttgtagtgagttgnagattatattattgtatgttagtttgggtaatagtgagattttgttttaaaaaaaaaaaaaagtaatgaagttatatttttttttgagattgagttttgttttgttgtttaggttggagtgtagtggcgcgattttagtttattgtaatttttgtttttcgggtttaagagatttttttgatttagttgtcggagaagtcgttataagaggcgtattttataatataaagcgtattttaaaataaatacgaagtattnnttntttntntnatncgatnttantanttaaggttcgcgtagggggagggaggaga

SEQ ID NO: 129 - DNA, 7746 bp, Artificial Sequence
  chemically treated genomic DNA (Homo sapiens)
ggtgtaggaaaagtatttgataaaagaagagaatttttttaatttgataaagggtaattttataaggtgatattgttatatatttattatatgttaaaataaagggaatttgtaatattaagtgtttgtgaagatgtggaatttttgaaatttttaattattgtttatgagaatgtaaaatgatatattttatttgataaagagtttggtagtttaaaaaaaaataaagttagttatatatttattatataatttaataattagttatttatttaatagaaataggaatattggtttatagaaaaatatgtatgtgaatgtttgtaatggttttgtttataattaatatttaaatttaaaagtaagtttttaagtaatgaatggataaataaattgtgaaatatttatataatgggatattatttagtagtaaagaggaatatattattaatataggaattaatatgaataaagtttaaatgtattttgttaagtgagggaggatagatttaaaaggttgtatattttataattttatttatatgatattttggagaaaattaggttgtaaaaatagattggaggttgttagggtttggaggtgggaaagtagttgacgttaaaggaaaattttggagatgtgatagttatgttttttatttttgttgtggttatttaattttaggtatttgtaaaattttagaattatatattaagaagaatgtattttattttatgtaaagtaagaataagtaaaattaaaattaatatatgtaaatagaatagtatttaatattatgaaaatatagaaatttttttaaaaatcggattgtttggaaaattagtgtttaaatataaatggttatttagaagaattatattatattttatattgtttatagttatttattgtttagtttatgattagttaattatattatttgaaagaaaagatggtttttgagaaaaggagtattgtttagttgagatttgatgagggtagaagagaggtgaggtagtttggaataaggtgttttttaagtagggtagattttgaagattttttaagtttttgaggattttgtattttatttgttatttttttttagattttgggttttatttttgttttttttatgggtttgttaaaaatttaaaattgtatatttgttattgatttaaataatatttttataatatagtatttatatttttattttattgatggagaaattgaagttagaaagattaagggatatatttaaggttttaaagttaataagaattaatttttagtaagattttagtttgttaatgttaatgtttatgaagttgtaatagttgggagtaattttaatattttggaagcgttttttgtttgtttgtttatgggtgatcgtgaaagttttatgaatagagttgagtttcgaagttttagatgggataagttagttagttaaatagtgtattaattttttttttggttattaataagttgggtattttttgaaaggaattttaatttttatttattttatagagatgttagaaagattaattagttgatgtttatttgagatagaataaaaataaaaatggaaaataaaaagatttataaatgattttttttttagttattattattgttattattattattattattattattattatttttgttgagttattgttttattagattatttttatatttttaattaggggagaaatagtttgaatgaaatttggaaattaaggaattaggagagatatgtatttaaggatggggtgggagttttttatgtttaagtattatatcgttttttaaattttttatttttgttttgggtttatttaatattgagggaggtttaatatgaaagtgggataaaggttttttttttttttagtttagtttttaatgttttttttttttttaaatttttagatatttgtattgatgttgttttttttttttttgtttttaaatttttattttttttattaagtatgggtattttttattaatgtattatttttagaggttgtagttaaaatggttaaagattaggtgagagtatttttagttttttgttttgttggtataagtgttagggggatattaaaggtttggtttagggtagtaggggatattgaaggggagaagtgatttaaggcgtattgatgataatgaggttagaggagtgttgggggagttgtttaaagtgttaggattatggtttagtaggtaaagggtgttgggtggtgaagtaggggaaggatataggacggtggtttttaggggaaagtattttatatataaagtttgttttattttattttttgtttgggatagtggcgttttatgatatttatagttatagtgtgtaatggagttgtaagagagggttttggagagtattaaattcgattttggtgttagaggtttaaatggagttaatgagttgttgtttagggatatatagagttaggattttaaagtgtttttaagtttttttttttttaataaggtttttttgattcgattttttttttttttttaaatttgtaattatttatttaggggattttttttttttaagtttgtaagtttcgtaagtgtagatattgtgtttatttggtttagtatatatttttagtgtttggagtaatgtgtaattttgtggtatatgtgtgtgtgagtgtatatattgtatgtttggatgtgtgtgtgtgtgtatggtgtaaatatggtatttgtagtatttatttttggttttttttttttgttttttttttttaaaagtatcgagtttttttttatttttttttttttttttattatttttagtattttgtttagagtgagtatttgttttatgtttgatgataatttgttgattttaaaagaatttataataaagtagtgataattatatttatattggtttagttttatttaattttaagtgtttttgtataagtgaaaattaattgtttatttttagtattgtatattttaaagtttttttaaatgtatattagttagtaaataaatttagttggtaggtattttttatttgttgtaggaaaatgggaagatgatttatttagtagagagaagattttttgttagattttatttgaagaagtttattatttttttttttaatggggtaggggagaaaggtagagttgaaatggaatttatgttttgttatttattggttggtttttttaataatttttgtaaattttttgttttaatttttttatttagaaaagtagtataataaaattttatttttagggttgtttgtgagaagtagggagagtatttgggttgtgtttagtatataaaaggtattttgtaaatgttagttttttttttttttttttttttatttgggtaagattttttggaagggttaagatttataatttttttgaataataagagagtatttagatattgattttgtatttatttttatggtttttagagtttttttttttaattgttatttttgtgaaagttaaaatatatatatagatatatatatatatatagttatttttttttaggttttttttagtatattgttttatttattttttgttttatttattttttttatttgaaatttttgagaaggaattattttatttgtttttatttatgtttgtttttttaaaatagtttttgtgaaatgtaaagttttaataatagagaaatgattatttggtggattgtagagtagtaaaagttaggttggaagttgtatatatattaaaatattgggtttgtttgatatttgtagtagggaaaggtgatttttattaaataaaatatgtaggaaatgtgaattaggttttttttttttttatttttttagtagaaattaaataatttttatattttacgtagtttttagtagaggatgttaatgatgtttttgatgttttttatatttgattaaattttattgtttgtgttaggttgttaattaaggtatggtttttttattgtataaatttttcgagttattttaaaggttaattgaattatgtatacgcgacgttttagtggatatggggttgtagatttttttttagatagtggattttttgggagaataaattaaaaaatagtgtgattgttatatagttagagtgaaggtttttagggggtagagaagaagtaattagagtttatttttttgttttagtttttttttttgtttatgtgtttagtttttttatggtattttttttaagtttttatgagtattttttatttttgtttttttttatgtaatgttatttgttgaaaaagatagaagttgtttaaggtacgtttatttggggtattaaatttgattgaggtggttagttatggtttgatttttaaggtaaatttttgattaaagattggttttttttaatgtatttttttaaaatgtatattattttttttaggggattgtttttaagataatatgtttatgtgattatagatttttttaaagttagaaattatgatttagaataaattatagtttttaggatttgttgaatgaataaaaagaattataagattatggattgtttaaattggaaaggtttttagagatttttttttttagtttttttatattgtagatgagaaataggttagaagggatgtatggtatttttaagtgtataaggatatggtaaaaaagaaattgttgtagaattttggttttttgaatgagggaaattttatagataggattggagttgtttaagtttgtttgtgaatttgttttgtgtttatttttattagggatatttatatataaattagtattggttattgtgaggaagtgttataaagaattttataaatttattaaattagatttttgaggatttttatttgatattatttttagttttattaatgtttttaaaaataatttgtttgggatgatattagtggcggaggtaatggttagtaattttttgtaagcgaggtatggaagatatatgtttgtgagaaaaaggtgtttatgaaattatggatggtataagaattttatttgatattgaagagtattttaatattgaggtatagaaaaattaagtattaattttggaagaatggtaagataagtgggtgaacggtaatattgttttttattaggaataaggattttagttattaaagaaatatttagatattttttttaaaggagagagtggattgagggtatttttttttttttgtagaaaagaggttgagatgaaatggtttgtagatcggggatatagcgtagttggtgtggaaattagtgaatttgggatacgagaattttttatagagtagaatttattttatttagaagaattaattatcgaaatttttggaattaaagtatttaagagtttttcggggaatattttattatattgttgtagtatttttgatttttttaggataaatattggtatatttgatatgatttgggatagaggagtattagttgttattaatttaggtgatcgtaaatgttatgcggatataatgttattttttttgggaaagaagttttaatattttttgtgtgttttttttacgatttaattaaatatttaggtttattattttatgttttatatgttgaaattgaaagattgtttggtaaaatatgtaatatatattgttttgagaaggttgatgtttttgaagaatgatataaaaattgggggattgattatttttttgaaaagttatatttatttatagaaaagtaaatgagatatagataaaattatattgatatgtttttgaggaattgaaaattatgttaaagtttgaaaatgtaatggatgaattttttaaattgtttataaattatatgatagatttatattaaaaatggttttttagtaaagttgtttattttttttaaaaaagttttaggagaaaaagatgtaattaaattttttaagtagtttttttggagaggagattatgatgtgaaagattatgtttgtgtgttttatagattgtaagatattttattaattagtgtgtgttatttgtataattaaaaaaatattttaaaatgtaatgtatattaaatataatatatatagaaaaattggtatttattttatttttttgagatggagtttcgttttcgttgtttaatttggagtgtaatggtataattttagtttattgtaatttttgttttttaggtttaagtgatttttttgttttagttttttaagtagttgagattataggtgtgcgttattatgtttagttaattttttgtatttttagtagagatagggttttattatgttggttaggttggtttcgaattttagattttaggtgatttatttattttagttttttaaagtgttgggattataggcgtgagttattgtgtttggtttgatattttttatgaaatttagaattgttgaaaaaaatataatattttagtagggtttaaggtggttttaaaagttatataaaagattagtttttattataaatttttgttttttatttagattttagtatttttttttatatggtttttttatatatgtaatagaattaagaaataaattttaattaaataatttgtaatagaattaagaaataaataaattttaattaaataatttatatggaataaatatttttaaattttaagaataaatttttttttaagtttaaaataaataaataaaaaaataaaaaaaaaataatttgtttttttgattttgtttagattattgttttttaagttattgtaagtggatgaagtatattggttaatagaatttattttttttaagttagatgagttttaaattgtgattttttttaagaagatagtttataatagatttttagattatgtattttgaagattgtgatagggaattttcgtgttgagggttatattataggtcgagagttagagatttataggattttagggatggatttttttaattaatattttgtatagtttttgggttttaataaataattggtgaatgtatgtaaatagaaataggtagatggatggattgatagatcgatgaagagatggatgaatagatggttgagtttttttaatttttattttttaagtattaaaatgggattttttatttttgaaggtaatgagattagtattttgtgtgttagtttggattagtttagttagttgtaattgttagaaagtttttttttatattaagtttaagtttgttagtggtttataatgtttgaggttttagttttgttttgagatataatgtagaataaatatttattttatttttatatgatagttttttagttatttaaaaatagttgttagatagatttatattttttattttgttttaattatttatttaattgtttatttattttatgagattattttaagtattaagttagatgtttatttaatgtttggtatatagtaagtagttagtaaatagtagatattattattgttataaagtttttgattttaaatttttttaatattatattttaaaatgttttgtttttaagagattttgtatgagattttttaaaaatgaaataagttagtttgagttaaataggagtatatagattataattggggataaaaaatatgtgttaagtgttgggagtttatttatttggattagaataggattatttaaagg

SEQ ID NO: 130 - DNA, 7746 bp, Artificial Sequence
  chemically treated genomic DNA (Homo sapiens)
tttttgggtaattttgttttgatttaaatgagtaagtttttagtatttgatatatgttttttgtttttagttgtggtttgtatgtttttatttagtttaggttggtttattttatttttaaaaagttttatgtaaaattttttggagataggatattttaaaatataatattgggggagtttggaattaaaggttttataataatgataatatttattatttattgattgtttattatatgttaggtattgaatagatatttaatttaatatttgaaataattttataaggtagataagtaattagatgaatggttgaaataaaatagaaaatataagtttatttggtaattgtttttaaataattaaaggattattatgtgggagtgagataaatatttattttgtattgtgttttaaaataaaattgggattttagatattataagttattggtagatttaggtttaatgtaaggaagaattttttaatagttatagttgattgaattggtttaggttaatatataagatattaattttattgtttttaagagtaaaagattttattttgatatttggagggtggaagttgaggaaatttagttatttgtttatttatttttttatcgatttgttaatttatttatttatttgtttttgtttgtatgtatttattagttatttattaaggtttaggaattgtgtagggtgttagttggggaagtttatttttgagattttatgagtttttgattttcggtttgtaatatggtttttaatacggggattttttgttataatttttaaagtatataatttagaagtttattgtgagttatttttttaaagaaagttataatttaaggtttatttgatttagaaaaagtaagttttgttaattagtatattttatttatttgtaataatttggaaaatagtaatttaaataaaattagaaaagtaaattgttttttttttgtttttttgtttgtttgttttaaatttaaagaaaaatttatttttagaatttgggaatgtttgttttatatagattgtttaattaaaatttatttgttttttgattttgttatagattgtttaattaaaatttgttttttgattttgttatatatatggagaaattatgtgaaaagggatgttaggatttgagtaaaagataagggtttatagtaaaaattaattttttatataatttttgggattattttgaattttattgaagtgttatattttttttaataattttaaattttataaagaatgttaggttaggtatagtggtttacgtttgtaattttagtattttgggaggttgaggtgggtagattatttgaggtttggagttcgagattagtttgattaatatggtgaaattttgtttttattaaaaatataaaaaattagttgggtatggtggcgtatatttgtaattttagttatttgggaggttgaggtaggagaattatttgaatttgggaggtagaggttgtagtgagttgagattgtgttattgtattttaggttgggtaacgagaacgaaattttattttaaaaaaataaaataaatgttagtttttttgtgtgtattatgtttaatatgtattgtattttaaaatatttttttaattgtataggtaatatatattgattgataaaatattttgtaatttgtaagatatataggtataattttttatattataattttttttttaaaggagttatttgaaaagtttagttatattttttttttttaaaatttttttagaaaaagtaaatagttttattaaaaagttatttttagtatagatttattatgtgatttataaataatttaaaaaatttatttattatatttttaggttttagtataatttttaattttttaaaaatatgttaatgtgattttatttatgttttatttatttttttgtaagtagatataattttttagaaagatagttaattttttaatttttatgttattttttaaaagtattaatttttttaagataatgtatattgtatattttattaaataattttttaattttagtatgtggaatataaaatggtggatttggatgtttagttggatcgtaagaaagatatataggagatattgaaattttttttttaggagggataatattatattcgtatagtatttgcgattatttggattaatggtaattaatgtttttttattttaaattatgttaaatgtgttaatatttgttttgggaagattaaaaatattgtaatagtatgatgaaatgtttttcgaagaatttttaaatgttttggttttaggaatttcggtgattggtttttttgagtaagatagattttgttttgtaaaaaattttcgtattttaagtttattgatttttatattaattacgttgtgttttcggtttgtaaattattttattttaattttttttttgtaaagaggaaaaaatatttttagtttatttttttttttaagaaaagtatttaaatgtttttttaatagttgaggtttttgtttttgatgaaaagtagtgttgtcgtttatttatttgttttgttatttttttagagttagtatttggtttttttgtattttagtattggagtattttttaatgttaagtgaagtttttgtattatttatagttttatagatattttttttttataagtatatgttttttatgtttcgtttatagagggttgttggttattgttttcgttattagtgttattttaagtaaattgtttttaagggtattaatgggattaaagatgatattaagtggaggtttttagggatttgatttaataaatttataaagttttttgtagtatttttttataatggttaatgttgatttatatatggatgtttttgataggggtgagtatagagtagatttataaataggtttagatagttttagttttatttgtaggattttttttatttaggaaattaagattttataatagttttttttttgttatgtttttgtatatttgggagtgttatgtattttttttgatttgttttttatttgtagtgtaaggggattgagggaaaggatttttagagatttttttagtttgagtagtttatgattttatgattttttttatttatttagtaaattttgaaaattatggtttattttgggttatagtttttagttttggggaggtttataattatataagtatattattttagagatagttttttgagaaggatgatgtgtattttgaggaaatgtattggaagaagttagtttttggttaaaggtttgttttgggggttaggttatggttggttattttagttagatttaatgttttaaatggacgtgttttagataatttttgttttttttagtaaatggtattgtatggagaagagtagaaatggaagatgtttatgagaatttgaaagagatgttatgaaaaagttgaatatatggataagaagaaaggttgagatagaaagatgggttttggttattttttttttattttttaggagtttttattttggttgtataataattatattattttttaatttgtttttttaaaagatttattgtttgagaggaaatttatagttttatgtttattggagcgtcgcgtgtatatgatttaattaatttttaaggtggttcgggaagtttgtgtaataggagagttatgttttaattggtagtttgatatagataataaagtttgattagatgtagagggtattagagatattattagtattttttattgaagattacgtggggtgtaaaagttgtttaatttttgttggagaagtaagggaagaggaaatttggtttatattttttgtatgttttgtttagtaaagattatttttttttattataaatattaagtaggtttagtattttggtgtgtgtatagtttttaatttagtttttattgttttataatttattaaatgattatttttttgttattaaaattttgtattttataagagttgttttggaaaaataaatataaatagaggtagatggggtgatttttttttaagagttttaaatggaagaaatggatggggtagagggtaagtgagatagtgtgttagagaaagtttggaggagggtggttgtgtgtgtgtgtgtgtttgtgtgtgtgttttaatttttataagagtagtagttggggagagggattttggaaattatggaaatgagtataaggttaatgtttggatatttttttattatttagaagagttataaattttagtttttttaggaagttttgtttaaatgagaagggaagagaagggaaaattaatatttatagaatgttttttgtgtgttaggtatagtttagatgttttttttgttttttataggtagttttaggaatgaagttttattatgttgtttttttagatgaggaaattgagatagaaagtttgtaaaagttgttgagagggttagttagtaggtaatagggtatgaattttattttaattttgttttttttttttattttattagaaggaaaagtaatagatttttttaaatagaatttgataaaaaattttttttttattaagtggattatttttttatttttttgtaatagataaaaaatgtttattaattgaatttatttattaattgatgtgtatttaaaagagttttgaaatgtgtaatattaaaaatgagtaattaatttttatttatataaagatatttaaaattaaatagagttagattaatgtaggtatgattattattgttttgttgtaaatttttttgaaattaataaattgttattaaatatagagtaaatgtttattttgaataaaatattgaggatagtggggaaaaaaaaagaagtagaaaaagattcggtgtttttgaggaaaggaggtaaggaaagagaattaaaggtggatattataagtattatgtttatattatgtatatatatatatatttaaatatgtaatgtatatatttatatatatatatattatagaattatatattattttaggtattagggatatatgttaaattagatagatataatatttgtatttacggagtttatagatttgaagggaagagattttttgaataagtaattataagtttgaagaggagggagaagtcggattaggagggttttattgaaagaggaaggatttgggaatattttagaattttggttttgtgtgtttttgggtaataatttattggttttatttaagtttttaatattaggatcgaatttgatgttttttaaggtttttttttgtagttttattatatattgtgattgtgaatgttatgggacgttattgttttagatagaaggtgggatgagataaattttatatgtagaatgtttttttttgggggttatcgttttatattttttttttgttttattatttagtattttttgtttgttggattatggttttggtattttggatagtttttttagtatttttttgattttattgttattagtgcgttttgggttattttttttttttagtattttttgttattttgggttaggtttttggtgtttttttgatatttgtgttaatagggtagaaggttgaaggtatttttatttaatttttgattattttagttgtagtttttggagatagtgtattagtggaaaatatttatgtttgatggaaaagatgagaatttgaaggtagaaggagaaagaatagtattaatgtaggtgtttgggaatttgggggaagggagggtattgaaggttggattggaagggagggggatttttattttatttttatgttaggttttttttagtgttgaatagatttagggtagaaatggaaagtttgaggggcgatgtgatatttaagtatggaaagtttttattttatttttagatgtatgttttttttaattttttaatttttaggttttatttaggttgttttttttttgattgaagatataggagtagtttgatgaagtagtaatttagtagaaataatgatgatggtgatgatggtgataataataatgataataattgaggaaagaattatttatagatttttttattttttatttttgtttttgttttgttttagatgagtattagttaattgatttttttggtatttttgtggagtaggtaagaattagaattttttttaagaaatatttagtttattaataattaaggagggggttgatatattgtttaattgattggtttgttttatttgaagtttcgaagtttagttttgtttatggagtttttacgattatttatgagtaagtaaataaaaaacgtttttagaatgttgagattgtttttagttgttataattttatagatattgatattggtagattaggattttattaaaggttagtttttattagttttgaggttttgaatatgttttttagtttttttggttttagtttttttattagtgaaatgggaatatgaatattatgttgtaggaatattgtttgaattaataataaatgtgtagttttgagtttttgataagtttataaaaagaataaaaatagaatttaaggtttagaggagaataataggtaaagtataagatttttagaagtttggaaaatttttagggtttgttttatttaggaggtattttattttagattgttttattttttttttatttttattaaattttagttggataatgtttttttttttaagaattatttttttttttaaataatatgattaattagttatggattaagtaatgaatggttataagtaatgtaaaatatgatatagtttttttaagtaattatttatgtttaaatattgattttttaagtagttcgatttttaaaaaaatttttatatttttataatgttagatattgttttatttgtatgtgttaattttaattttatttatttttattttatataaagtaaaatgtattttttttggtgtatagttttgaggttttataaatgtttagagttaggtaattataataaagatagaaaatatggttattatatttttaaaatttttttttggcgttaattgtttttttatttttaggttttggtaatttttagtttgtttttatagtttggttttttttagaatgttatatgagtggaattgtagaatatgtagttttttgagtttatttttttttatttgatagagtgtatttgagttttatttatgttgatttttgtattaataatgtatttttttttattgttgagtagtattttattgtatggatgttttataatttgtttatttatttattatttaaaggtttgtttttaggtttgggtattaattatgagtaaagttattataaatatttatatatatgtttttttgtgaattaatgtttttatttttgttggataaataattgattgttgagttgtatgataagtgtatggttaattttatttttttttaagttattaaattttttattagatgggatatattattttgtatttttataagtaatggttaagaattttaggagttttatatttttataagtatttagtattgtaagttttttttattttagtatataatgggtatatagtagtattattttgtagagttgttttttattaagttaagaaagttttttttttttgttagatgttttttttatatt

SEQ ID NO: 131 - DNA, 6645 bp, Artificial Sequence
  chemically treated genomic DNA (Homo sapiens)
tttgatttagtgatttgttcgttttgggttttttaaagtgttgggattataggcgtgagttatcgcgtttagtttttaattttgtatttttagtagagacggggtttttttatgttggttaggttggtttcgaattttcgattttaggtgatttgttcgtttcggttttttaaagtgttgggattataggcgtgagttattgcgtagggttatatttaggttttttattggttggttttaggtgtttggtgatgttgataaaatatatgataatattaagtttttttgtgttaggttttttgtaataaattatttagttgtttaataaattaggtatattgattatttattatatgatagatataattttagatatttagtaaagtattatataagtattgagagtttattttgtgttaggtttttttttattaattgtttttatttgtttaataaatatttatttagttttattttgttagtagttattgttttagtgttttatatacgttcgtgaataaaataaattattatataataagtgtttattgagtgttaattgtttgttagagtttatgttattaagtgttgttatttgtttaatatttattgattatttgtgtaaggtattattttaatttgggatatgttagggaataaaataaaatatataatggtggtgttgtttttgttgaaagtttttagttgataattagatttttttttgtatttttgtttgtttgttttgagatagttggagtgtagtggtgtgatttttattgtaatttttgtttttttggtttaagcgatttttttatttgagttttttaagtagttgggattataggtgtatgttattaagtttggttaatttttgtgtttgtgttattttgtttaggttgattttgaatttttgggtttaagtaatttatttatattagttttttaaagtgttgggattgtagggatgagttattgtgtttggtcgaatttttttcgtttatttaaatgtttattgatttacgatatgcgagatttgtgtaggttttttgttggttttatttttttaatcgttgtgtgagtttgtgtttttagggaaagtgaggtttaggaagggaagtgagttgtttagcgatatattgttaggaaaaggggttttgagttgagtttaggtaaaaagttttagagttgttgttttgatatttgttttttttttttttttgttttttattttatttgtgtttttagttagatttagttatatgtttattcgaagtcgtattgttatggaaagtgggtgtaggtggtgggtattttggcgtgattcgtttgtttgattggtttgagatataggagggttttatgttggttttcgagcggtttttgttcgtttaggatttttttgattatattatagagaagggtttattgggtgaaggtttaagtcgttgtttttttggttaagtagtggtagttatttagtattgttattttcgtggagttgtttatcgtgatattaaggatgagaatattttgatagatttacgtcgtggttgtgttaaatttattgattttggttttggtgttttgttttatgatgaattttatattgattttgatggtaaggtttttttaaatttttttggagggattgtttttatttgatggttttgtgatttttggtttttagtggtggggtgttttgtaatttttgatttatattgtattatataagatgatcgattgttaatattggggatttttagttttgttttttgataaagtttattttttaatggtgtgttaattttattttgggtttttattttggtgaggggattttgttattattttgagtattttttttttggtaaggggattttgttattttttagtgtttttattttgttgaggggattttgttattttagttgttttttatttagtgaggggattttgtttttattttgagtgtttttaattgtggtgaggttattttttttggagagtttggggttggagaagggtattatgagattgagttggtttaatttttggtttgtgtgtagggataagggtgtatagttttttagagtggatttttcgatattagtattatgtattttcggttattgtttggttattgggtatttttttttatgatatggtgtgtggggatattttttttgagagggattaggagattttggaagttgagttttattttttagtttatgtttttttaggtgaggttttattgattttagtttagaagattttattttttttagggattagtattttttattgattgttaattttttttttttgttttttggtttatagattgttgtgttttaattcgtcggtgtttggtttttaaatttttttttcgatttttattggaagagattttgttggatttttggatgtaaatattagtcgaggatgtattttttaatttttttaaaggaggttttgtttttttggtttggtttttgttattttaagtttggtttggtttggtttggtttttaatggttagaagagttattttatggttatgttatagggatagatggatatttgttgatttggttttataggttattattagttattaaagtttagtattattaaggtaagggattgaggattaggggttagaagatataaattaagtttgtttagttttttttttaattttataaaggagttttttttttagaatttgtggtttttgattttggagggggaattttttgttttttattttgttaaggaagtttattttggtgaagttgtttttattttgagtttcgggatttttattttgatgatgtgttattttatattggtattttttattattattatataaatttagtttatatgtttttatttgggtaagggtgttttttttttaatattttagtagtttttattttagtaaagggatttttttttttagtttagggttttatattgggttaagttgtttatttgttttagtttaggattttttattttgggggaggtaatgttttgttgttattttaaggttttttttttttttttttttttttgggtgaggggattttattttgttattttaagtgtttttattttggtgagaagaattttatttttataatttgggaaggaatggaagatggatattatcggatattattagatattaggatgggatggatggttttttgggggatgggttaggggaaataaggtttgttgtttgtttttttggggcgttttttttaatttttgtagatttttgtaatttttttttgagtcgggattgtttaattattaaaatgtaaataattacgtattgtggggaggggagttttaagtgtgtttttttttttttttttgtttggattatttaaaaagttatgtgtggaaatttattatttaataaaagtaatagaattagaagcggttggttatttgtaggtgtgaggtttttatggagtatttattgtgtattgagatagattgtttttttgttttgtttttaggaagttatagttttatgttgttattttaaagagttttaaggatttttgaagttgtattatatatatataaaaaaattttgatttttttgtttttgattttatgtagtgtttagtatgtgtagaagggttttttgttggagatattgtgtatattgaaggtgtttagggtatatttttaattaagatggttattttagaagtagaaaaattattttttttggtattttaggggaatgaagaagtttttttttttgttgtagaagaaaagttttgttagggtattggttagggcggggttggggttgggcgttgattggaatttgtttagggtgtagttatttgttttgttttttatttttagtttttttttttatttttatttttatatatttatttttttaattttttttttaatatttgatttatttggtttattttattttatgttggttttatttgtttcgatttgagttgtttttttttttgttttgtttatttgtttcggtttagtataaatttcgtttttcgggttttagcggtttttttgttttagtttttagagtagttgggtataggtgtatattattaagttcgggtaattttttttttttatttgagacggggttttgtcgttttgtttaggttggaatttttgagtttaggtgatcgttcggtttagttttttaaagtgttgggattataggcgtgagttatcgtttttggttcggatttttgttttgtttttaaatgttagttaatttgtgagtttttcgtttgttttttttgttatttttagtggtgatttatttgtttttttttatgtgcgttaatttttttttgtatttttatttgtttatttttatttgttttgtttttatttgttagtttaatatttttgattcgtatttgatgttagtacgtttttatttcgatttcgttaggttaaagttttttcgtttttagattttcgtgtgttttttagggggcgaggtttcgttggaagacgggaaagcggaattttagtttaattatgaagtatttggtagtttttgatacggaaagggcggcgttttatggagaagttgttaataaagagtcgagatgaaaggggtggttgaattaatgagtttaggagataagatcgggggatgatttggaaagcgcgattagtgaagcggacgaacggtaggataaggcgggtttagtgataggaatgggtcgatgaagttttgtagggatggtgggtaggtcgatcgggtcgtgttttcggtttttcgattcgacggaatttggaaatttcggggttatttatatattgagtttttaggagcggaggagaaaagttattattttgacgatttcggttttcgttttatttttatttaggtggttcggtagcggaagtgacgaacgcggaagtggtttttttgttgtcgaggggacgggtcgggtagatgttaatatggtagcggttggggttggtggttttatcgcggcgttcgggttaggggcggttttcgcgggtgtattggagtcggggatcgttagtgcgggtgagatagtttgttcgagtagtcgtatgggaggcggaggtcgggatcgttgggagtcgggaatgttttttattaaagtgagagggagtatttcgtgtggatcgacgtgtgtgtgtgtgtgtgtgtgtatattgttagtgtgttgggggcggggaagagaatattttgagagtgattgtgggattttttcgtatatggagagtagagattattgtgagtgtggtgggtaattttttttgggaaggttaaggttatcgaaattattttgaatatgtggagttttttcgtgtggaagagattattttgcgggtgtgggagttttttattgaagaagggggagattattttgagggtggtggttttttttttataaagggatagagattattgtgagttagggtggggcgagtttttttttatgtgattagagagggtttattttgaggatgggggtgttttttattatgtgcggaggagatcgttttgggggtttttttttaatggaggtagagtttattgtatattcgggtgggagggtttatcgttatatggtggagaaagaacgttttgagagtgtcgggtttttttttatagtagagagagtttattgtgagtgtgggtagagtaaggaaaaatttattagttagagggttcgtgtgcggtggtgggagggtagattatgtggagtgtagggaagtatttttttatttggttgagggagttagattttttttggtgggataattatttttgatataggatttagtttttgggagtatgtgggaattattttttgtatttagtagattattttggttcgagaggaattagttgttataggagtgaggggttggagagattattttgggtatgaggaggattattttatatgggatgtaggttatttttagtgtgagggaatcgaattattttttagataggagaaagatcgtttttagggggtgaatatattttatatagtggttttattttttgtattgatgtgttattttttatatgagatagttttttattaaataggagtattattttatataaatttttagtttgttaatttataaatgggaattttcgtagtttttttggagatgatagtgatatgagtttattgaggtaatttatagaaattttttaatttagtgataggtatatagtaaatatttaataaacgtggagaatgtagttgtcggtattttttttggggaagagttgttttttatttgggaggaagtcgaggcgcgtggttagggtttgttttagttattatttgatattttagtaaggattttaggtatggattgggatagggtggggtttattttttttttttggttttttttgtttatggttgaggtagtaagtcggtaggagttagatttttattgggtgagggtaggtaggttgagggagtaagtagttatggttaggagggttttgggtgagaaagaaagggggtgggtggtggtgtggttatgttttagcggtttttgatttcgttttttttttttgtttttttcgttttttatagt

SEQ ID NO: 132 - DNA, 6645 bp, Artificial Sequence
  chemically treated genomic DNA (Homo sapiens)
gttgtggggaacggaaggggtaagggggaaggacggggttagaagtcgttggggtatagttatattattatttatttttttttttttttatttaggatttttttagttatggttatttgtttttttagtttgtttgtttttatttaataagggtttgatttttatcggtttattgttttagttatgagtaggaagagttagaagggagaaatgggttttattttgttttagtttatatttggaatttttattgaggtgttaggtaatggttgaggtaaattttggttacgcgtttcggtttttttttaagtgagaagtaatttttttttagaaagaatatcgataattatattttttacgtttattgagtgtttattgtatgtttattattgggttaagggatttttatggattattttaatagatttatattattgttatttttaaaagaattgcgaggatttttatttatggattagtaaattgagaatttatatgaaatgatgtttttgtttaatgagggattgttttatgtaaagaataatatattaatgtagggaatgaggttattgtatgaggtatgtttattttttaagaacggttttttttttatttaagaaatgattcgatttttttatattgagaatggtttatattttatatggaatgattttttttatatttagaatggtttttttaattttttatttttgtgataattggtttttttcgaattagaatagtttattaaatataagaaatgatttttatatgtttttagggattgaattttgtattaggaatggttattttattaagaaaggtttggtttttttaattagatgaggaaatatttttttgtattttatatggtttgtttttttattatcgtatacggattttttagttaatgaatttttttttgttttatttatatttataatgagttttttttgttataaggaaggattcggtatttttagaacgttttttttttattatataacgatgagtttttttattcgaatgtataatgaattttatttttattaggagggagtttttagaacggtttttttcgtatataatgaaagatatttttatttttaaaatggattttttttagttatataaagaaggattcgttttattttaatttataatagtttttgtttttttataaggaaggaattattatttttagaatagttttttttttttttagtgaggaatttttatattcgtagaatggttttttttatacggaaggattttatatatttagaatggtttcggtggttttagtttttttaaaaagaattatttattatatttataatggtttttattttttatatgcggaaggattttataattatttttagaatgttttttttttcgtttttaatatattgataatgtgtatatatatatatatatatacgtcggtttatacgggatgtttttttttattttagtgaggaatattttcgatttttagcgatttcgattttcgttttttatgcgattgttcgggtagattgttttattcgtattggcggttttcggttttaatgtattcgcggaaatcgtttttggttcgggcgtcgcggtggaattattagttttaatcgttgttatgttggtatttgttcggttcgttttttcggtaatagaaaaattattttcgcgttcgttattttcgttgtcgggttatttgagtgaaggtggagcgagagtcgggatcgttagggtggtggtttttttttttcgtttttaaaagtttaatgtatgaatagtttcgggatttttaaatttcgtcggatcgggaggtcggggatacggttcgatcggtttatttattatttttatagagttttatcggtttatttttgttattagattcgttttattttgtcgttcgttcgttttattgatcgcgttttttagattatttttcgattttgttttttagatttattggtttagttattttttttatttcggttttttattggtagtttttttataaggcgtcgtttttttcgtattagaaattattaggtgttttatggttggattgaaatttcgttttttcgttttttagcgaggtttcgttttttggagagtatacgggaatttggggacgaagaaattttgatttggcggggtcggggtgagggcgtattggtattaggtgcgagttaggaatgttaagttagtagataaaagtagagtaggtgaggataaataagtgaaaatgtaaaggaaagttgacgtatataagggaagataagtgagttattattgaggatggtaaaggggataggcgaaaggtttataggttagttagtatttggaagtagggtaagagttcgggttagaggcggtggtttacgtttgtaattttagtattttgggaggttgagtcgggcgattatttgagtttaggagttttagtttgggtaaaacgataaaatttcgttttaaataaaaaaaaaaaattattcgggtttagtggtatgtatttgtatttagttattttggaggttgaggtaggagaatcgttggaattcggaaggcggagtttatattgaatcgagataaataagtagggtaagagagggaataatttaggtcggaataagtgaaattaatatggaatagggtaggttaggtaagttaagtgttgaaggagaaattagagggatgggtatgtaagggtaaagatgggggaagaggttaaagataaagagtaaaataggtgattatattttggatagattttagttagcgtttaattttagtttcgttttggttagtattttgatagggttttttttttgtaataggggaaagggtttttttatttttttggggtgttagggaaggtagtttttttgtttttgagatagttattttgattggggatgtgttttaaatatttttaatatgtatagtatttttaatagagaatttttttgtatatattgggtattgtataagattaggggtaggggaattaagatttttttgtgtgtgtgtggtgtagttttaagaatttttaaagttttttaggatggtaatataagattgtggttttttgaggataaagtagagggatagtttgttttagtgtatagtagatgttttataaaagttttatatttataaatggttagtcgtttttgattttattatttttattaaatagtgggtttttatatatggttttttaaataatttaggtaggagaagagaggagggtatatttggaatttttttttttataatacgtgattatttatattttagtaattggataatttcggtttaggaggaggttgtaagaatttgtaaaagttggagggagcgttttaggagaataaatagtaagttttattttttttagtttattttttaaaaaattatttattttattttagtgtttggtggtgttcggtggtgtttattttttatttttttttaaattatggaagtaaggttttttttattagaataagagtatttgggataatagagtagggtttttttatttaaaaaaaaaaaaaaaaaaaagaagttttggggtaataatagggtattattttttttagaataaagaattttgggttgaggtaggtaagtagtttgatttaatatgggattttaggttaggggaaagggtttttttattaaaataaaagttattggggtattggaaggaaagtatttttgtttaagtaagagtatatgaattaagtttgtgtggtggtagtaggaggtgttaatgtggggtgatatattattagaataagagtttcggggtttagaatgggaataattttattaaaataaatttttttagtaaaatgagaagtaagaagttttttttttagaattagggattataggttttgggaggaaggtttttttgtaggattgggaagggaattgggtagatttggtttatgttttttaatttttgatttttaattttttattttagtaatattggattttaatgattggtaatgatttgtaaaattaagttaataaatgtttatttatttttgtgatatggttatgggatggtttttttgattattgggggttaggttaggttaggttaggtttagggtagtaaggattaggttaaaggggtagggttttttttggaggggttgaggggtatattttcggttggtgtttgtatttaggggtttagtaggattttttttagtgagggtcgggaagaaggtttgggggttaggtatcggcggattagggtatagtagtttgtaggttaagaagtagagagggaagattagtagttagtagggggtattggtttttgagaaggatggagttttttgggttggggttagtgaggttttatttggggagatatgggttgggaagtggagtttagtttttagaattttttggttttttttaaagggaatgtttttatatattatgttatagaggaggatgtttagtgattagatagtggtcgggagtgtatggtattggtgtcgagagatttattttggggggttgtatatttttgtttttgtatataagttaggggttagattaatttaattttatgatgtttttttttaattttaaattttttaggaaggatggttttattataattaagagtatttaagataaaagtagagtttttttattagataaaaagtagttaaaataatagagtttttttaatagaataaaagtattgaaaagtaataggatttttttattagagaaagaatatttaggatggtaataggatttttttattagaataggagtttagaataaggttagtatattattaaaagatggattttattagagggtaaggttgagaatttttagtattagtaatcgattattttatataatgtagtatgggttaaggattataggatattttattattggaggttaaaggttataaggttattaagtaaaaataatttttttagggagatttagagaagttttattattaaagttagtgtagggtttattatgaagtagggtattagaattaaaattaatgagtttggtatagttacggcgtaggtttattaggatgtttttatttttgatgttacgatggataattttacgggaatggtagtgttggatggttgttattatttggttaaagaagtagcggtttgggtttttatttagtgggtttttttttgtgatatagttaaagagattttgggcgggtaaaggtcgttcgaggattagtatgaagtttttttgtgttttaaattagttaagtaggcggattacgttagggtgtttattatttgtatttattttttatagtagtgcgatttcgagtgggtatgtgattgagtttgattgggggtataggtggggtgggaagtagggagagaaaaaagatagatgttagggtaatagttttgaggttttttatttaagtttaatttagggtttttttttttgatagtgtgtcgttaagtaatttatttttttttttgggttttattttttttaaagatataaatttatatagcgattgagagggtgaaattagtaaagagtttgtataaatttcgtatgtcgtagattaataaatatttgaataaacgaaagaagttcggttaggtatagtggtttatttttgtaattttagtattttgggaggttgatgtgggtggattgtttgagtttaagagtttaagattagtttgggtaaaatggtataaatataaaaattagttaggtttggtggtatgtatttgtagttttagttatttgggaggtttaggtgggagggtcgtttgagttaagaaggtagaggttgtagtgaagattatattattgtattttagttgttttaaaataaataagtaaaaatataaagaaaaatttggttattaattgaaggtttttagtagaagtagtattattattatgtgttttgttttgttttttgatatattttagattagaatagtattttatataggtgattaataaatgttaaatagatgatagtatttaatagtatgggttttgataagtagttagtatttaataaatatttattgtgtaatggtttgttttgtttacggacgtatatgaagtattagaatagtggttgttaatagagtagggttgaataaatatttgttaaataggtgaaaataattagtaaaaaaggatttagtataaaatgagtttttaatatttatgtaatattttgttgagtgtttagaattatgtttgttatatagtaggtggttaatatatttaatttgttaaatagttgagtgatttattataaaggatttagtataaaaggatttagtgttattatgtgttttgttagtattattaagtatttagaattagttaataaaaagtttaaatgtggttttgcgtagtggtttacgtttgtaattttagtattttgggaggtcgagacgggtagattatttgaggtcgggagttcgagattagtttgattaatatggagaaatttcgtttttattaaaaatataaaattagaggttgggcgcggtggtttacgtttgtaattttagtattttgggaggtttaaggcgggtagattattaggttagg

SEQ ID NO: 133 - DNA, 7058 bp, Artificial Sequence
  chemically treated genomic DNA (Homo sapiens)
gttgttttgtttaaattttatgtagttttgtgtgttataattaaggttttggtggagtgggtttatgagggaaaaataagattcgagggttgtagagatttgtgggagaagtatgttatttggagttgtatatttatttattatttttttggattagggatgtttgtttggttttgtattgtttttggatggattattattttgtttgtttttttttttttttttttttttttttttttttttttttttttttttttttttttttttttttttttttttttttttttttttttgtttttttgtttgtttttttgtttttttgttttttttttttgtttttttttttgtttttttttttttttttttttttttttttttttttttttttttttttttttttttgttttttttttttttttttttttttttttttttttttgtttaaaggttatttattaataatttatttttgttgttgttttttattgtatttgttttgttttaagttttaggatatatgtttaggatgtgtaggtttgttatataggtaaatatgtgttatggtggtttgttgtagttattaatttattatcgaagtattaagttcggaatgtattagttatttattttgatgtttttttttttttattttaataggttttagtgtgtgttgtttttttttatgtgtttacgtgttttcgttgtttagttttgatttataagtgaaaatatgtggtatttggttgtttgattttgtgttagtttgttgaggataatggtttcgagttgtatttatgtttttgtaatggatatgattttatttttgtttatgtttttatagtattttatagtgtatatgtattatattttttttatttagtttattattgatgggtatttgggttgattttatttttttgttattgtgtatagtgtagtaatgaatatatgtgtgtatgtattttttaaaatataataatttatattttttgggtatatatttagtaattggattatgataatattaattttaaaagtaaatgggttaaatgttttaattaaaaaatattgaatgataagttggataaagagttaggatttattagtatgttgtatgtaatagatttattttatttgtaaagatatatataggtttaaaataaagggatggaagaaaatttattaagtaaatagaaagtagaaagaagtaggttttgttattttaatttttgataaaagagattttaaattaaaaagattaagaaagataaagaaggttattatataatggtaaagggtttaatttaataagaagagttaattattttaaatatatatgtatttaatatagaagtatttagatttatgaagtaagtttttagagatttataaagagatttagatttttatataataattgtgggagattttaatattttattgttaatattagatagagttttaaaatagaaaattaataataatgtttaggatttgaatttaattttggattaagtggacgtgatagatatttatataattttttatttagagataatagaatatatattgttttttgtatcgtattgtatttattttaaaattaattatagaaatggaagtaaaatattttttagtaaatgaaaataattgaaattataataagtagtgttttcgattatagtataattaaatcggaatttaagattaagaaatttatttaaaattttataattatagggaaattgaataatttgtttttgaatgatttttgagtaagtaatgaaattaaggtagaaattaagaagtttttttaaattagtgagaataaaaagataatataatagaatttttgagatgcggttaaagtattgttaagcgggaaatttaaaggattaaattttttatattaaaaagtttgatagtttttaaattgatatatatatcgtaattaaaagaattagagagttaagtgtaaataaattttaaagttagtagaagataagaaataattaagattagagtggtgttgaaggagatagaaatatgaaaaattatttaaaaaattaataaatttaggagttgttttttgaaaaaataaaataaaatagatagtagtttagattaataaagaggaaaagagagaagaattaaatagatataataaaaaatgataaaaggggatatgattattgattttatagaaatataaattattattagagaatattataaatatttttatgtaaataaattagaaaatttagaagtagataaattttttgatatatatatttttttaaagatgaattgagaataagatgagatttataataagttttgaaatggaggtagtaataaatattttattaattaattaaaaaaaaaaaaaagtttaaaattaaatggatttatagttgttttgtttttttttattttttgtgtattagttgtttttttgattagttttaatgtaagtatttgaatgttttagttgaaggtgttgtatttatttattttatttgtttttttttataagagttatgtatatgagttgtttttagttggttattttgtttatttttttatttataataatttttaagagtatattttatattaagtgattttgttaatataagaaatatttttgagatgttgtagatttggttttaggttattataataaagtaaaatatgtaataaagtgagttatataatttgttttggtttttttggtatataaaagttatgtttatataatgttgtagtttattaattttgtggtagtattaagtttaaaaaaagtatatattttaattaaaaatatttttttgttaaaagtagtaatatttattttagtttttagtgagttgtaaattttttttttcgtggagagttttgtattaatgttgttggttattaatttattagagtagtgattgttagtagttggcgtgattgtggtatttttttaagggtaagaaaataatggtatatgttatatttattaatttttttttttataaaagatttttgtttagtatatatttttgtttgatagtaatttttttatagtggtattttttttaaaattggaattaattttttgaaagtttaatgttgttttattaagtaaatttaagttatattttaaatttattgttgttattttagtaatgtttatataatttttattaggagtagatttaattttaagaaataattttttttttttttttataagaagtaattttttatgtatttgttttattacgagattgtagtagtttatttacgtttttaagttttatttttaatttgagttatttttttatttttattatatttgtagttattttttttattgaagtttttgttatagggttaataggtttatatgtttattttgtaataatagattaattataatgagatattatgttttgtaataaagaaagagtataataattggagggtattgagaaaggaagatagttggaggtttttaaatttatttttttaaggaaatttgggttggagtttttaaggggttaatggagggtgatggattgaaaaattggagttatagattagttaggataatgaagataaaattagtaggagttggaaattgtattttttggtgagttagttttttgtggggtttttgagagtagttggtattagggaggttttttagattagttgagttagtagttttattagtatgttggatttgaaggaatatttagaagagaaaattatattttaaaatgtttaagttattatttatagaatagttaagatgaattttaattttgtaataatgtttgtataattttaagataatagttaaaaaattattaggaagtgagttagagagtaagttaatgtaataattaatattgaatgtattataggtttggtttatttttttttttttttttttttttttttgttttttattaatttaataaagtttataggaatagttttattttgaaattttttaaattatatatgatggttgtaagaattaatacgtaaatgttatattataaatgaatttttaaaatattatgttaagtaaaataagttagttataaaatattatatattgtgtgattttatgtatttaaaaaatgtttagaataggtaaatttatagagatagaaatttaagtagtagttgtttaggataggataaatgtagaaagaaggggtagggagtaaaaggttaaagtttatagggtttatttttaggagataagagttttttaaaattgatttttacggtagaagtataattttgtgaatatattatgaaatattaaattttatataataattgataatttgtatgatatttgaattatacgttaataaatttataaaagtttttgaattatatttagttattttatttttagttttgtgttaaagagattgtaggaatatgagttttttattgttatttttatgtatattattttgaaatatattatatgagttaggtgatgagtttatttaagattattgatattagttgaattatagtatttaaaaatttagggttgggtgcggtggtttacgtttgtaattttagtattttgggaggttaaggagggtagattataaggttaggggttcgagattattttgtcgaatatagtgaaattttatttttattaaaaatatagaaaaattagttgggtgcggtggtaggtgtttgtttgtagttttagttatttaggaggttgaggtaggagagtggtgtgaatttgggaggaggagtttgtagtgagtttttaaaaaaaaaaaaatttaaaaagaatattaaacgtatttgtgtaaataggttatttattttttatttgtttttttgttatttatatgtttagattgttaatataatgtatttattttgaagtgtaaaagttatattttaattttttgattgatttatattggatgttattatgagaaatgatagaaaggagtagtaattggaaaataagtattgtattgtattaggatgtttatgaaatggattttagtttttttgttgatatagttgagttgttattttagttttgggagttgtggaaaggtgttggtgtggtttatagaatttagttattggatgaatataaagataattttggatgaatttgtttagagaggttatgaggtgattgtattggtatttttagtttttatttttttcgattttaatagtttatttatttttaaatttgaagtttattttgtatttttaattaaaattgagtttgaggatattattaagtagttggttaagagatgggtagaatttttaaaagatatattttggttatattttttataagtataagaaattatgtggatatttaatgatatatttagaaagttttgtaaggatatagttttaaataagaaatttatgaagaaattataggagttaagatttgatgttgtttttgtagatgttgtttttttttttggtgagttgttggtcgagttatttaaaatattttttgtttatagttttcgttttttttttggttacgtaattgaaaagtatagtggaggatttttgtttttttttttttatgtgtttgttgttatgttagaattaagtgattaaatgatttttatagagagggtaaaaaatatgatttatgtgttttattttgaattttggttttaaatatttgatatgaagaagtgggattagttttatagtgaagttttaggtaagtaatttttttgattggtaatatgaagatttaatttttttgtatttttgaagttgagtttgtataaagttataaagttagggtagtggggtatttttgtaatgaatttattaaatgaaattgtaagatgatttattaaatttataagtattatagaaaatgtaaattataggattagttaaaattttgtggttattatttatatagaagattttaggaagttataagtttgtatattagtgtatttaagatttttttaagtaattatatatttgttttattatatatttttttattttaaaaaaaagttagatttatttagaaatattttgttgaatgtatattggtagattgagtagttatatattttttagaattatttatataatattgtagaaattgtttttttttgtatattttagttttattatttagtaattgtaatatgtatttatgttattagaacgttttttttatagttgagagaaatgatgtttttattttagaattaaaaattaatgtatgttatttgaagtttttagtgtttttatttttttattaaaggattggaaattatttattttaaggttaattattttgttaaagtgtgaatattaagttataattgtatagtttttttttgaaattatgtatttttttttaaaaatatgagttaaattaaggttgaatgtaaatttttgttttaataagtttttaaaattttttagttgtaatttgtaaatatatttatttaaaaattaatattattatgaggttagtatgatttaaaagtagtagtaggtataaggattttagttattattttaaaataattaatagttaatttgaagaattaaagataaaagattagattaatgaatgggaaattagattatttgttagaaaattgtttttatgggtatggtagaattaattgattacggagtttaaagagtggtttatacgtatatttgttattatcgaaggtttataaaataaagaaatggagattaattttttatggtttgtttgtgattgtgaatatattgatgtgatatgagggatgtagtttttttttatgatttttttattattttgttttttttgtaaatatatatgggtaaaatatataatatataaaaattaaattatgtttatatacgaatatatgtatttttttttaaggtataaatattttgtttatatttttgtttatattattttaattttttttagaaaattatttagtttaattattttgtgttatttatttttttttttttttttttttattagg

SEQ ID NO: 134 - DNA, 7058 bp, Artificial Sequence
  chemically treated genomic DNA (Homo sapiens)
tttgatgggggaaaaaaaaagaaaagatagatgatataagataattaaattaggtaattttttgaaagaagttagaataatgtgggtaaaaatgtaggtaaagtgtttgtgttttgaaaaaaaatatatatattcgtatataggtataatttaatttttatgtattatatattttatttatgtgtatttataagaaaggtaaagtggtgagagaattatgagggaaaattgtattttttatgttatattagtatatttataattataaataagttatagagaattaatttttatttttttattttgtaaattttcgatagtagtagatatacgtataaattattttttgagtttcgtgattaattaattttattatatttataaaaataattttttaataaatagtttaattttttatttattaatttaattttttatttttggttttttaggttaattgttgattattttgaaatgatggttgaaatttttgtatttattattgtttttgagttatgttaattttataataatattagtttttaggtaaatatgtttgtaaattatagttagaaaattttgagaatttgttgaaatagaaatttgtatttaattttaatttggtttatatttttaaagaaagatatatagttttaaaaaaaaattatatagttgtaatttaatgtttatattttgataagatgattagttttaaaataaatggtttttaattttttagtgaaggaatagaaatattggaaattttaaataatatgtattggtttttgattttgaaatggagatattattttttttaattgtggaggaaacgttttagtaatatgggtatatattgtaattattaaataataagattgaaatatataagaaaaaataatttttgtaatgttatatagatagttttaaaaaatgtgtaattatttaatttattagtatgtatttagtaagatgtttttgaataagtttgatttttttttaagatgaaaaaatgtataataaaatagatatgtgattgtttaaagaaattttaggtgtattaatatataggtttatgattttttggagttttttgtatgagtgatggttatagagttttaattgattttataatttatattttttatagtgtttgtgagtttggtagattattttataattttatttgataaatttattataaaaatattttattattttgattttatggttttatataaatttagttttaaaggtataagaaagttagatttttatgttattaattaaaaaagttatttatttagaattttattgtagaattgattttatttttttatgttaaatatttggaattaaaatttaaaataaagtatatagattatattttttattttttttatgaaagttatttggttatttagttttgatataataataggtatataggaaggagggaatagaagttttttattatgttttttaattgcgtagttaggagagaagcggaggttgtagataaagggtattttaagtaattcggttagtagtttattaaaggggaaaatagtatttgtaagaataatattaaattttgatttttgtagtttttttataagttttttatttgaaattatatttttatagaattttttaagtatgttattaaatgtttatatgattttttgtatttgtgaaaaatatgattaaaatgtgttttttggaagttttgtttattttttaattagttgtttgataatatttttaaatttagttttagttaaagatataggataaattttaaatttaagagtagatgggttgttgggatcgaaagaaatggaagttgaagatgttaatatagttattttatgatttttttggataagtttatttaggattgtttttatatttatttagtggttgaattttgtgggttatattagtatttttttataatttttagagttaaagtaatagtttagttgtattagtagaagagttgaagtttattttatagatattttgatgtaatgtaatgtttgttttttagttgttgtttttttttgttattttttatggtgatatttagtataaattagttaagaagttaaaatgtaatttttatattttaaagtaaatatattatattaatagtttgagtatgtggatgataaagagataaataaaaggtagatgatttgtttatataagtgcgtttaatgttttttttggatttttttttttttgagagtttattgtaagtttttttttttaggtttatattatttttttgttttagttttttgagtagttgggattatagataggtatttgttatcgtatttagttaatttttttgtatttttagtagagatggggttttattgtattcggtaggatggtttcgaatttttgattttgtgatttgttttttttggttttttaaagtgttgggattataggcgtgagttatcgtatttagttttagatttttaagtgttgtaatttagttaatattaatgattttggatggatttattatttgatttatgtaatatattttagaatagtgtgtataagagtagtagtgagaggtttatgtttttgtagtttttttgatatagaattaaagataaaatagttaaatgtggtttaaaaatttttgtaaatttgttgacgtataatttagatattatataaattattaattattgtgtaaaatttaatgttttatagtatatttatagaattgtgtttttatcgtaagagttaattttagagaatttttattttttaaaaataaattttataagttttagttttttattttttattttttttttttgtatttgttttattttgggtaattgttatttgaatttttgtttttatagatttgtttattttggatattttttaaatatatggaattatataatatgtgatattttatggttggtttattttatttagtataatattttaaaggtttatttatgatatagtatttacgtgttgatttttataattattatgtatgatttagagagttttaagatgaaattatttttatagattttgttgaattaatgaaggataaagggaggggaaaaaaaaaaaaaaagtaaattaagtttgtagtatatttagtattaattattatattagtttgttttttgatttattttttaatagttttttggttattgttttagaattatgtagatattgttataagattaaagtttattttaattgttttatagataataatttaaatattttgaaatgtggtttttttttttaggtatttttttaggtttagtatattgatgaaattattgatttagttggtttgagggatttttttgatgttagttgtttttaaggattttataaggagttgatttattaaagaatgtagtttttaatttttattgattttatttttattattttgattaatttatgattttaattttttagtttattattttttattaattttttaaaaattttagtttagatttttttgaggaggtaagtttgagggtttttaattattttttttttttagtgttttttaattattatattttttttttgttgtaaaatataatgttttattgtaattggtttattattgtagagtgggtatatgaatttgttggttttataataaagattttagtggaggaaataattgtagatgtggtggaaatagaaagataatttaaattagaagtggaatttgaagacgtaagtaaattgttgtaatttcgtgataaaataaatatatgaggagttattttttatggaagagaaaagaaagttgttttttgagattgaatttatttttggtgaagattatgtgaatattgttgaaatgataataatagatttagaatatgatttaaatttatttaataaagtagtattagatttttagaggattgattttagttttgaaagaagtattattatgggaaaattgttattaaataaaaatgtatgttaaatagaaattttttgtgaaaagaagggttagtggatgtggtatatgttattgtttttttatttttaagaaagtgttatagttacgttaattattagtagttattattttgatgagttagtagttaataatattaatgtaagattttttacgaagaaaaaagtttataatttattgaaggttgagatgagtgttattatttttagtaaagaagtgtttttaattaaggtgtgtattttttttgaatttaatattattatagaattaatagattgtagtattgtgtaaatataatttttatgtgttagagaaattaaaataaattgtgtgatttattttattgtatgttttgttttattgtagtagtttggaattaaatttgtaatattttagaagtattttttgtgttagtaaaattatttaatatgaggtatatttttgaaaattattataagtgggggagtgggtaagatggttaattagaagtagtttatatgtatggtttttgtggagagaaatagatggagtgagtaaatatagtatttttagttgaaatatttagatatttgtattgggattaattaaggaagtaattgatatatagagaatggagaaaaataagatagttatgaatttatttgattttgggtttttttttttttttggttgattggtagggtatttattattgtttttattttagaatttgttataggttttattttatttttagtttatttttgggagggtgtatgtgttaaggaatttatttatttttagattttttagtttatttgtatagaagtgtttatagtattttttgatggtggtttgtgtttttatggagttagtggttatatttttttttattattttttattgtgtttatttgatttttttttttttttttttttattagtttagattgttgtttattttattttatttttttaagaaatagtttttggatttgttgattttttgaatagttttttatgtttttattttttttagtattattttgattttagttattttttgttttttgttagttttggggtttgtttgtatttggttttttagtttttttagttgcgatatatgtgttaatttgaggattgttaagttttttgatgtgggaaatttagttttttaaatttttcgtttagtaatgttttagtcgtattttagagattttgttatattgtttttttgtttttattggtttgaaagaattttttgatttttgttttaattttattatttatttaggagttatttaagagtaggttgtttaatttttttgtagttgtggggttttaagtgagttttttaattttaggtttcgatttgattgtgttgtggtcggagatattgtttattatgattttagttatttttatttgttaaggagtgttttatttttatttttgtgattgattttagagtaagtgtaatgcggtataaagaataatgtatattttgttgtttttgggtgaggaattatgtagatatttgttacgtttatttgatttagagttgagtttaagttttgaatattgttgttaattttttgttttgaaattttgtttaatattgatagtggggtgttaaagttttttataattattgtgtgggagtttaagtttttttgtaagtttttaagaatttgttttatgagtttgggtgtttttgtattgggtgtatatatatttaggatagttagttttttttgttgaattgaattttttattattatgtaatagttttttttattttttttgatttttttggtttaaagttttttttgttagaaattaggatagtaagatttgtttttttttgttttttatttgtttggtaaatttttttttatttttttattttgagtttatgtgtgtttttgtaagtgagatgggtttgttgtatatagtatgttgatgggttttgattttttatttagtttgttatttagtattttttaattggggtatttagtttatttatttttaaggttaatattgttataatttagttattgagtatatatttaaagaatataaattattgtattttaaaagatatatgtatatatatgtttattgttgtattatgtataatagtaaagagatagaattaatttaaatgtttattaatgatagattggataaagaaaatgtggtatatatatattgtggaatattatgaagatataaataagaatgagattatgtttattgtagggatatggatgtagttcgaagttattatttttagtaaattaatatagaattagataattaaatattatatgtttttatttataagttagaattgaataacgagaatacgtggatatatggaggggaataatatatattggggtttgttgggatagggaagggagggtattaggataaatagttaatgtatttcgggtttaatatttcggtgatgggttgatagttgtagtaaattattatggtatatatttatttatgtaataaatttgtatattttggatatgtattttgaaatttaagataaaataaatataatgaagaataataataaaaataaattattaataaatgatttttgaataaggaaaggaagaagaaaggaagaaaagaaagaaagtaagaaagaaagaaggaaggaaggaaagaaagaaagaaagaagaaagaaagaaagataagaaagaaagtaagaaaagaaagtaagaaagtaagaaagtaagtaagaaagtaaggaagaaagaaagaaagaaagaaagaaagaaagaaagaaagaaagaaagaaagaaagaaagaaaggaaggaaagaaaagaaagtaagtaggatgatggtttatttaggagtaatgtagagttaagtaaatatttttgatttagggaagtgatgagtgaatgtgtaattttaggtaatatgttttttttatagatttttgtaattttcgggttttgttttttttttatgaatttattttattagggttttaattgtgatatatagagttatatggagtttaggtagagtagt

SEQ ID NO: 135 - DNA, 5827 bp, Artificial Sequence
  chemically treated genomic DNA (Homo sapiens)
  unsure (4768..4769, 4792)
agggtagtattttatttttggttttgtttgtatattttgtgttagatttaggtaggttttgttttttaagggtaaggtcgaggttttaaatatgtgtatttttagggagtattatttaaatggtattatatataaaggttttgggaaaattttattttgttttttgtttttttttaaattttttaagtatatagttggttaggtttgttaggttaggtgttgttttgtacgtttggttatttttttcgtttttttattttatatagtatggtttggtttaaaggaaagggaaagttaggaggttttttaaaggtttaagttgttgattttaaataaataattttttgtattgagggattattagaaatttaatatgtaatgttatatgttatatgttaataagatggtattttggtttttatttgtatttgtgtttgtgtgtacgatttttttgagtattttatcgggataaataagattgttaaattaatatttataattttattcgtgtttattagagtttatatatatgcgaataatgtgatggttgtaaatatttgttttagatattagagggttagatttatagatcgattgattttttttcgtttacgtttatatttcgatttcgttttacgattttattaatatgtatatgtatatttatcggtttttatttttttcgttagacgtttagtttttcggttatcgtttatggttttttcggattttcgtcgtttttagatggtttcgtattttttagtatttcgtttcgttttgcggtttatgtgtttttttttttcgttttttagttcgttttttttttaatcggttaaattacgatttttagtttaaattaataatttttcgggacggtttcgatgaaggagattttattttaggagtgttttattggatgtagtttaggaagttttttgcggtaagttttgtaattaaaggaattttgttttagtaagatacgttaaatggtggtagaagtaagaattagaggaaaggttgagtaatattttggtatttgaatagttgtgtttttaggaaattttgttagtaaaatttttagaggttaagtattttagttagatgttataatgaatttttgtgttgttaatttaaatgttggaatggagtatgtgttttaggagttagattaatattgttttattttaagtttaagtttgattatttttaaattgaaattttgtaaatgtgtgtgttgtagtttatttaaaatttattgggtgtttgttaattttggttatattgaaaagtttttgttattttattatttacggacgttagagttttgttgtttattagggtatgttagttttttaatttatttttgaaaatttattatggttcggggtttttttgttattttttacgttttatattttgtttgttttaaaatattgtttttagttttttttttttaatttgataatgtattttaaaataattatgtttggtaagtaatatattgataaatgtaaaagttataaatagaagtgttgttgtgtttttaaaatattatagggttaggagtagtggtttatgttttttattttagtattttgggaggttgagagaggtaaattgtttgagtttaggagttcgagattagtttggttaatatagcgaaatttcgtttgtattaaaaatataaaaaattagttgggtatggtggtatatatttgtaatattagttattttgaggtagaaggattgtttgagtttagaggttaagtttgtagtgagttttgattgtgttatttttattttagttcggatgatagagggggattttgttttaaaataaaaataaaataaaataaaaatttagttaggtacggtggtttatatttgtaattttagtattttcggaggttaaggagggtggattatttgaggttaggagtttaagattagtttggttaatatggcgaaattttgtttttattaaaatataataattagttgggtatggtggtgtatgtttgtaattttagttatttaggaggttgaggtaggagaattatttgaatttaggaggtggaggttgtagtgagttaagatcgtgttattgtattttgttatttattttagtttgtgggatagagagagatttcgttttaaaaaaaaaaaaaaatttatattttagaaataattaggtttttaaagtatttttaaaaggggtatttgtggaaattagttattaataatatatttaaaggagagagattgaatgtttttttttaagatgaggaaagaggtaaggatgtcggtatttgttattggtatttaatattgtattgtttttaattaggataattagttaagaaaaaaaaataaataaaagatatttatattggaaaggaagaagtaaaattgtttttttttgtagatggtatgattttttatgtaaagtattttaacgatcgtggatttgttttttttttttttatgtttttgggttttggttttgttttttttttggagtagaagtttgtggtgtagtaggatttaattgtttttaattgaacgttgtagaggatttttttttcggtgtttttcgtattgggggaagaggtgatttaatttttgagtaagggataaatttagtagtgtgttagtagtaaaaagtatggatattggtattagtttgtttgtatttagatattagttgtgtatttattagttgtgggattttaggtaaattgttgaatttttttttgtttttatttttttatttatagaatggggataataatagtaattattatatgggattgttgtaaggatggaaagtgttaaaatatttaaattttgttatagtgtttgttataaaagaagtattttaggtttggcgcggtggtttatgtttgtaattttagtattttgggaggttgaggtaggtggattgtttgaggttaggagttcgagattagtttggttaatatggcgaaattttatttttattaaaaatataaaaattagttgggtgtagtgatatgtgtttgtgattttagttattttggaggttgaggtatgagaattgtttgaattcgggaggtagaggttgtagtgagttgagatagtatttttatattttagttttggtgatagagtaagattttgttttaaaataaaataaaataaaagaagtattttatgggattaggttttatagttaggtattatatatgtagtagtgatatttttagttttgttgtttttgttagatgggatgaaaaattttatgagaagttggttggaagttttattgatttattaaataggttttttatttgaagttatgtttttaattatttagaagttgaggtatgtttgatttatggtattagaagggatgattttagagaggttattttgtagtataatgagtattatttttgaaggatggagaatttagaattttgatttatttgattatgggaaaatttgatttggtgagtgattatgattatgaagtgagatttggtaatttaatggtggttataggatagagattttgaagatattgagttggtttatatatttgttttgttgtttcgaatttttgttaaagttgaaagaagaagttagttttttgttgggtatattgttagtgtgtaattgtgaagagtttagttggagtttgttttttataatagtttttgattttattagttttattttgtttttaggggtggtatagaaggagtattttaggagtttttaaagatagtagtagaatataattattaagataagattgtgattgtggttttgaattagatagaattattattttttgtaaattttgtttttgtttagaatagtggtttttaaaatgtggtttttgattaatattattagtattatttaggaattagttagatatgataatatttaggttttatttaatatgattgaatttagttttatttaagattaagattttcgtttttattttttttttattcggtttcgagtttcgtttcggacgttggattcgagcgtaacgggagtaggtgtttatattaaaggtttgggtcgcgaaggtagagattttatgtgtcgtaaaaaaaattttacggataattgggagattttttttaaaaaaataaaatttcggagttacgtatttcgcgtttagggggcgtgggtacggtttattacgagggtagggttcggcgttagttttcggtaaaattaataatatttgttaggttttaaataaaaaggttttaatagcgataaatttatttatttcgggagtgtagtaatttgggatattaagcgtcgtttacgttttagttacgcgttttagggatatatcgattgaggcgcggttattttcgcgtacgttttgtatgttcgtgtttcgtttttatagtagagcgtttaaaatcgttacggtggttttgttggggataaattatttacgttttattgttttgtaaatttaattcgggaggtatgatttggttgggatagtttaggaagatggttacgaaggtatttgggggagtagatatatgtttttgagaatgagaggagtaaatcgttggacgattatgagtaggaagaaaattaggtttttattttttaattagtggttttgagttggtaatttagatagcgcgcgttacgtaggtgtttcgttttggggcgtggtcgcgcgttggtcggttggggcggggtttgtttttggttttatttagtttcgttttaggcgagcgtnncgtatttatatcgcgttgttagnttttgttttgttttagttgttcgaaggtgatttaggtgagtgttagtatttgcgggtagttacgagtatcgggtcgtcggggtattttagtttttgcgtaggtatttttatattttagtttatgcgagttgaatagagattcgttgtttttaatttttttttatttttattagtaaattagcgatttgaatttttattttttttgttttttttttgttttgtattttttttttggtggagtgggttgggagcgtttaagcgaggttcgatttatttatgtgtaatttaggaaaatttttaaggttaattttttttttatttttttttttttttttttgttgttttcgggttttgtagtttgggggtatttttttgtttttcggagattattcgattttgttttttgttgtttcggcgtagaggatggcgagcggatattgtcgggggagtggttgtgtaggtttgattagtaatattggttttagaagtggtttgtgagtaatgtattcgttgcggtggggatgtgttgttagggacggtcgggagagtttttgaaggaattgtgtttgttttttttttgttttttagaatcgtttgtttatttgtattgggaaggtggttattttttatcgttgatttagagtaagagacgtttttaggcgggtgggggattttttaggtttttttttggattttagaaaatgttttttttttatgtggggtggtagtacggagtcgtagggttatagtagtggggtagttgtagggcggtggaaggcgttggagattttttagtgagttatttttcgaagttgtggtttttgttgatattttttttgagagttacgagtttataagttatataatagcgtcgggggtaagtaagtgtggaagacgaggtaaaggaaaagtagatattaggatgggtagaaggagaggtaggggttagaattttaattttttttttggggataggagatgttttggaggggaaggcgttttcggttttgtaggtatgtgttgttgggtttaggt

SEQ ID NO: 136 - DNA, 5827 bp, Artificial Sequence
  chemically treated genomic DNA (Homo sapiens)
  unsure (1036, 1059..)
atttaggtttaatagtatatatttgtagagtcggaagcgtttttttttttagggtattttttgtttttagggaaggaattaaagttttaatttttgtttttttttttatttattttagtatttgttttttttttatttcgttttttatatttatttgttttcgacgttattatgtagtttgtaaattcgtgatttttaaggaaagtattagtagaagttataatttcggggaatgatttattaaggagtttttagcgttttttatcgttttgtaattgttttattattgtagttttacggtttcgtgttgttattttatataaagaaggggtattttttgaaatttaaggaagaatttgaagagttttttattcgtttagaggcgttttttgttttaagttagcggtaggaaatgattatttttttagtataaatggataaacgattttaagaggtaggaggaaaataaatataatttttttagaggttttttcgatcgtttttagtaatatatttttatcgtagcgggtgtattgtttataggttatttttgaaattagtgttattgattaggtttgtataattattttttcggtagtgttcgttcgttattttttgcgtcggaatagtagagggtaaggtcgggtggttttcggaaggtagaaaggtgtttttagattgtagagttcggggatagtaggagaggaaaggaaggaatggaggaagggttgattttgagaatttttttgagttatatataaataggtcgggtttcgtttagacgtttttaatttattttattagggaaaagatgtaaggtaaggggagagtagagagggtggaaatttagatcgttaatttattgataagggtggggggaggttagagatagcgggtttttatttagttcgtataggttgaaatatgggagtgtttgcgtaaaggttgaagtgtttcggcggttcggtgttcgtggttgttcgtaggtgttagtatttatttggattattttcgaatagttggagtagaataaaanttggtagcgcggtgtgggtgcgnngcgttcgtttggggcggggttagatgaggttagaagtaggtttcgttttagtcgattagcgcgcggttacgttttaaggcggggtatttacgtggcgcgcgttgtttaagttgttaatttagggttattggttgggaggtggaggtttaattttttttttgtttatggtcgtttagcgatttattttttttatttttaaaaatatatatttatttttttaggtgttttcgtggttatttttttaaattgttttagttaggttatatttttcggattgggtttgtagaatagtgggacgtgaataatttgtttttagtagagttatcgtagcggttttaggcgttttgttgtaagggcgaagtacgggtatgtaaggcgtgcgcgaaagtagtcgcgttttaatcgatgtgtttttgaggcgcgtagttggggcgtgggcggcgtttggtgttttaggttgttatattttcgaagtgaatggatttatcgttgttagggtttttttgtttagggtttaataaatattgttagttttgtcgagagttggcgtcgagttttgttttcgtggtgggtcgtatttacgttttttgagcgcggagtgcgtggtttcggagttttgtttttttgaaaggagttttttaattgttcgtggagttttttttgcggtatatggagtttttgttttcgcgatttagatttttgatgtgaatatttgttttcgttacgttcgggtttagcgttcggggcggggttcgaggtcgggtggaggaggggtgggggcgggggttttggttttgggtgagattgggtttagttatgttaggtggggtttgagtattattatatttaattagtttttaggtaatgttgatgatgttggttaaggattatattttaagaattattgttttgagtaaaaataaaatttgtaggaggtggtgattttatttgatttaaaattatagttatagttttgttttggtggttatattttattattatttttggaggtttttgaggtgttttttttgtattatttttgaaaatagaatggggttgatgagattagagattgttgtgaagagtaagttttagttaagttttttataattatatattaatagtgtgtttagtagaagattgatttttttttttagttttaatagaggttcgagataataaagtaagtgtgtaagttagtttagtatttttagagtttttattttgtgattattattgggttattagattttattttatggttatggttatttattagattagatttttttatagttaaatgagttagagttttaggttttttattttttaaaagtaatgtttattatgttatagaatgatttttttgggattattttttttaatattatggattaggtatattttaatttttgaatgattagaaatatgattttaaatgaaaggtttatttaatgaattagtaggatttttagttaattttttatggaattttttattttatttggtagaaatagtaaaattgaaaatattattattatatatataatatttaattataagatttggttttatagagtgttttttttgttttgttttgttttgagatagggttttgttttgttattaaggttggagtgtaggggtgttattttagtttattgtagtttttgtttttcgggtttaagtaatttttatgttttaatttttagagtagttgggattataggtatatgttattatatttagttaatttttgtatttttagtagagatggggtttcgttatgttggttaggttggtttcgaatttttgattttaagtagtttatttgttttagttttttaaagtgttgggattataagtatgggttatcgcgttaggtttagagtgttttttttatggtaggtattgtaatagagtttagatattttaatattttttatttttataataattttatatgatagttattattattatttttattttatggatgaggaaatggaggtaaagagaaatttaataatttgtttaaggttttatagttgatgagtgtatagttggtgtttgaatataggtagattgatgttagtgtttatgttttttgttattaatatattattgggtttgttttttatttagaagttaaattatttttttttttagtacgggaagtatcgaggggaaagttttttgtaacgtttaattgaaggtaattgaattttgttgtattataggtttttattttaggagagaaatagagttagggtttaagagtataggggagggagagatagatttacgatcgttggaatattttatatagaggattatattatttgtaaagagagatagttttatttttttttttttaatgtggatgttttttatttattttttttttttgattgattgttttggttaggggtaatgtaatgttgaatattagtggtaagtgtcgatatttttgtttttttttttattttagggggaagtatttagttttttttttttaaatatgttattagtggttggtttttatagatgttttttttaagaatattttagaaatttaattatttttagaatgtgggtttttttttttttttaagacggagtttttttttgttttataggttagagtgagtggtagagtgtagtggtacgattttggtttattgtaatttttattttttgggtttaagtgatttttttgttttagttttttaagtagttgagattatagatatgtattattatgtttagttaattgttgtattttagtagagatagggtttcgttatgttggttaggttggttttgaatttttgattttaagtgatttattttttttggttttcgaaagtgttgggattataggtgtgagttatcgtatttggttgggtttttgttttgttttgtttttgttttgagatagggtttttttttgttattcgggttggagtggaagtggtataattagggtttattgtaggtttgatttttggatttaagtaatttttttgttttaaagtagttgatattataggtgtgtgttattatgtttagttaattttttgtatttttagtatagacggggtttcgttatgttggttaggttggtttcgaatttttgagtttaagtaatttgttttttttagttttttaaagtgttgggataagaggtatgaattattgtttttggttttataatgttttaaaaatatagtagtatttttatttgtaatttttatatttattagtgtattatttgttaaatatgattgttttggagtatattattaagttaggggaagaaaattaggaatagtattttgaagtaagtagggtataggacgtggggggtagtagaaaagtttcgggttatggtaggtttttaggggtagattaggagattaatatgttttggtaagtagtagggttttgacgttcgtgggtggtagaatagtaaaaattttttagtgtagttagagttagtagatatttaatgggttttaagtaagttataatatatatatttgtaaagttttagtttaggagtgattagatttgggtttaagatgaggtagtgttggtttaatttttaaaatatatgttttattttagtatttgagttagtaatataggggtttattatgatatttggttaaggtatttaatttttagaaattttattgatagagttttttgggaatatagttatttaaatattaaaatgttgtttaattttttttttaatttttgtttttgttattatttgacgtattttattggggtagggtttttttggttgtaaggtttatcgtagaaagttttttgaattatatttaatagaatatttttggggtaaagttttttttatcggagtcgtttcgagggattgttagtttgagttgggggtcgtggtttggtcggttgggaggggggcgggttgggggacggagagggggagtatatgaatcgtagggcggagcgagatgttggagggtgcggggttatttggggacggcgggagttcggggggattataagcgatgatcgggaggttgggcgtttggcgagggaggtaggagtcggtaaatatgtatgtatatattggtggggtcgtagagcgagatcggggtatgggcgtggacgagggggagttaatcggtttatgagtttggttttttagtgtttggggtaaatatttatagttattatattgttcgtatatatataaattttgatgaatacggatgagattgtgggtgttaatttgatagttttatttgtttcggtggggtatttagaggagtcgtatatatagatataagtgtaggtgggaattaaggtgttattttattaatatgtaatatataatattatatgttaagtttttgatagttttttagtgtagggaattatttgtttggaattagtagtttaggtttttggagggttttttaatttttttttttttttggattagattatgttatgtggaatgagagagcgagaaagatggttagacgtgtagagtaatatttggtttaataggtttgattagttgtgtgtttaggggatttggaaaggaataaaagatagagtgaggtttttttaggatttttgtgtgtgatattatttgagtggtgttttttggaaatgtatatatttgggatttcggttttgtttttggaaggtagagtttatttaagtttagtatagggtgtataggtagggttaagggtgggatattatttt

SEQ ID NO: 137 - DNA, 7892 bp, Artificial Sequence
  chemically treated genomic DNA (Homo sapiens)
tagattttggatatttgatttttgttagattttataggttgtttgttaattttgatgatagttttttttgttgtgtagagttttttagtttaattagattttattggttagttttggtttttgttgtaattttttttggtatttttattatgaagtttttgtttatttttatgttttgaatggtattgtttaggtttttttttagtgttttatggttttgggttttaagtttttaatttattttgagttaatttttgtataagttgtaaggaaggagtttatttttagttttttgtatatggttagttagtttttttagtattatttattgaataggagatttttttttttattgtttgttgttgttaggtttgttaaagattagatggttgtagatgtgcgatattatttttgaggtttttgttttgttttattggtttatatgttaaaatagttattttgaattttttgtttgataggttatatatttttttttttagtattgtttttaggtgatttatttagtttatttggtgaggttatgtttttttggatggtattgatatttgtaggtatcggttagtatatgggtattgaagtgttaggtatttattttggtttttgtagttcgagtttgtttgtatttattttttttgagaaggtttttttaggtgtttgaaagtatttgggtattttgatttaagttgtatttgtattagggagtattttaagtttagtaatattgtggttttttatagatttatagaggtattgttttgatggttttggataagatttagaaaattttttattaggtagagatttttgttgtttttttttatttttttttaaataaataaattttttttttttttttttttttttttttttttttgtgttggatattttggagtttggggtgggatgatataagtttttttgtggttatattattggggttgtattaggatagatttgaaattagtatagtattgtattttgtttaaggtttgatgtaattattatttggttattaatgtgtgtttaagattttggggttttataattagttggtagtaaatttagttacgtttgtatttttttttttagggtggtgagtttttttaggttttgggtaggttgagaggtgtagtttgagagttagagattggagttagaatttttagaaatttatttggtgtgtagtttagttggtatttaaattattagatatattttttttttttttttttataggtaggagagtttcgttttttggtttttattattataggtttaggggagtatttttaggttattgttacggtttatttaaggtataaaggttttttaattagtttgtggtgaatgttgttcggtttggaatttattttttagggtagtgggtattttttgtttatggcgggtttagaaatgttataaaagagttaaggtttggattttaagagtttgtttggtgttttgattttgtggtcgaattggtatttaaggtgtaatataaagttttttttatttttttatttgttttttttaagtaaagagttttttattatcgttattatagcgggtaatgtgttggattttatttaaagttagtatattttagagttttatttaaggtttatgtttatggcgtattatttgggtattattgatggttattcggggtttaaaggttagtaagtaatgagttttgttaggattggttttttttttttaaagtagtagattttttttttgtttagcgtatgtttagaaatgtttaggagttagggtttgggatgtgagttttatgattttgattagttttttattttattgtggttaagttggtaattaagatgtaaaataaagttttttttattttttttttttttttttttaagtagaaggaaggaattttttttggagttatgagttatgttgtttggggttgggggaagggtggtgtaagttatttttttagttgttttagttggtgttttcgtaggttatgtgtttttttaagtttattggttttgagtttagtttagtattagaaattatttaggagttgtagtttttgtggtttatattgatttttaagtttatttagagttttaaggtattttagtttatagtgatgaagtttgatggaatttaagtttcgataattgggatgggtgatttttttttggttaggtttgatttaaatgttttttttgtgggtaggtgttaattgagtttagtttagttttgttttatattgtgatagggaagtattgagtttaatgtatagttttataatttttgtgtttttttttttttaaatatatagttttttttttcgtataatgtggttattgttgggaggatgaagggtggtattagtaatttaagattgttttttttattttttttaatgttttttttagcgatatgaagttaaaattaggaattatgagtgtttatttgatttttggtttttataaagttgttttttgtgtatagatagttgtttaaatttagtgtttttgtagagagggataattagtagatttttttatttagttattttgttttgttttttttttttatttgtggtagttttgattatatttatttgtgtagattttttagtggttttttgagtattgtattatatataaataatttattatattttattatttttattattttatttgtttgagtgaagtgtagaaattttattttttttatatttttttatttttttttatttatttgtaattgttttatgtattttttttatttatatttagaattatattagatagtgatataatttttgttttatttataaaaaataatttagaaaatttaataggaagaggaaagttttttgtatttattaatattttttttgattatgttttttattttagatattttaagttttttttgtttataattttttatttagagaattttttttagttatttttttattttgaaaagcgttagttttagaataattttaagagttagtaaatgttaataattttaagtttagtgattttatttttgtttatttattttatcgttggttttggtattttgtagttttttttgtttatttagtggtttttattatttttatagaatataagaattttattaggtaatgtgattttggaatttttaatgtgtttattaatttacgttggtagaaatgatataatatagtgattaatagtaaatttttttaattattttttgttatggtatttttgtaagtttattttagtttatgaaggtataaggaagagtttagtggaaaatagagagagagagagttgaattagtattatttttgtttttaatatttttatgagtgtttttgggtgtgttgggtcgaattagatgaattttataatgaataaaagaagaacgaaattaaaaggaaataatatttttaagagaaaggttaaaggtaaagtaaaaaatttttgagttaagtaatgagaagggttttttaaaaaagaaaaaaaaattttgggagaagtataagatgtaatatgggttgaaggaagtaaaggtaggaaaaattaagatttataaattttgagaaggtagtttgagtagaagtaaaaaatattagtgattaaaagtttggaaatgatttaagagtagttaagtgtagttaagtgtaaatagaatagttaaatttttattatttttagatatgaaaatttggagaattgttagatagttataaatgtaatatagtgggggaaaagattatagagtatatttgttaagatataagttaataggatagagaatagagtttattatagtattttttttaggaaaaattgttgttaattaatttatatttgaatataatttgaaaatattttggtagatggaatttgttattttttgttgatttttatttataggaaattttttttgtataaatttttttatgttatagtttaaaaatattgatttatttaatatatatttattgagtttattggtgttgtgggtattagaaatataataggtaaggtttttgtttaatagtggtttttaataggaatatagaatgagaagttgaagttacgtggttagagttggaagtttaattttattgtttattagttgtgtaaaatttattttgatatttttatttttaaattgagaataatagttttttatttgtttattttgaatatgttttttgttttgagaattaaatgagatgatatatatgtgtgataggttttgtaaatttataaaatattatataatttgagtaatttttgtattagttttgtttaaatttttttttatatgtttaaaattttttattttaaaattttagtttaggtttttgtatatagtaagtgtgggtagtaattattggatattttagcgaatgaaatgaaaatatattaatatttttatttttacggtttttatgtgttattaagatgataagagataataagtataataaattttttaatgatatagtatattagaaggtgataaatgttgtggaaaagaaaattaaagtaggataagaggaattgagagttttgagggtataagatttaatttttaattgagaagagatttttaggaggtgagagtgttttttatgttagtattttggggaggataattttggatagggggaataattagtataaatattttgaggtggagtgttgttttttttgtttgagtaatatttaagaggttagtgtggttggagtggagttaggtaaagataaaataaataaaaatgagattagagaggttacggagagggtatagtattgtaggttatgattgagtgaattgggggttattatagaaatgtgaagagaagagtgatgtgatgtgatttatattttaaaagaattatttaggttatgtttttgataatggataaaggcggaagaggaggaaaggatagaggtagagagataattaataagttattatagaaaattaggtggagatgatagtggtttgtatgatggtggtagagttggaggtgtagggtaaaggttagattttgaatatattttgaaagtaaaggtaataagattttttgatagattgattatggtgtgttaaagaaagagaggaatgtaggatgattttagtgtttttgttgataattataagtttggagttgttaattggatgtagaagtttattggagggtttagtttggggaaaggattaggagtaggttaggtatgttaagtttgagatgtttgttaaatatttagataggaatgttaaagatgtatttgtgtttaagagttaggaatgtaagagggaattttaggttagaaataaaaagttagaaattattcgatatagatggtatttaaagttgtgtgattgattgatatgatagaagtggcgagaatagattgagaagtttaaggaatgagttttggattattttagtgttaggtaagtagttgaaaaaaagagagagagagaaggtattaaaggagattgaggaagagtgattaggaaagtataggaaaattcgagaaatatatggtgttttggaatttatatgaaaaagatatatttagaaagatagagtgataaatttgttaaattattgaatttgttaggtaaaataagaatagagaattgatttttggatttagtaaagtagagattattagtgatttttataaaaatagtttcggtagtgtggaaagattaaatttttgtttagagtgggttttagagagaataataggaattgaagaaagtaataaattttgttaattagtttagttttaaaggaaaagagggaaatatgatggtagttggtaggggaagtgtggttaagagaggttttttgtttgttttttaagatggaagaaataatagtatgtatgtaagtttataggagggatttagtaggtatggggaaattgatgatataggatagaaagggaagaatggttttttgtgaaagtgaaaggggatgggatttataggatgaatatgtaaataaagattggttgtaaagagaggtatgaatagtttatttatagaaatagtaaaggtagagtgttggtatagatgttggtaagtggaaaaatattatggtaggaggttatggagttttattttaaatattttaattttattagtgaaataagtacggtaatttagtagaatgtgaagatgtaaaagaatagaatttgagaaaatagacgatatgaaataattattagaaaagtaggtgagtgaatgaattaagaaaatattttatgattattggttagtaaacgttgggatatatagtgaattttataaaatttttgtttttataagttttgtattttatagagtgggtaataaataataaatataataagtatattatgtatatagtatagggttatgtaagtttatggcgaggtaagttcgatgattttgtatttttttttagatatgttttgttgtatggtgtaggtttatagtagtttagtaatttgaattatttaggattgtggttttattaagtaagtttgataaagagagagggttagagggttgtgggtgtttttaggttgagttaagagagaagatatgaaggaggtgaggaatagtaaaaaggtggtaagattagtggattgaaggatgtattaaagaatgattgtgtttaattttttgatatatttgacgtatgttttttatttttatttttttgttagttatagcggataaggatattttttggattcgaattttagttttattagttataagatattgattttgttttattttgtttgttttattttaaaatatatgtttttaattattatagtttgataatgagttttgatatttatttagtaaggtaaatttataaataattgataattttttaagataaaagtgaaataaatttttaggaaaaaaaagttgagaaaatttgttataaattaaagaaaataagaaagagatagtagatgaaagagtgtttattaggtgaaaggaaaatgatttaagagggtagttttgagatgtaggaagaaataaaaagtaagaaaatgataaatgttttgataaagttaaataagtattaatttataaagaaataatatttttagaagagttatgaatatatagagaaaattaaagtatatgataatggtaatgtaaaagttaggggtgaataaaaaagagatttaagagttttaaaattattgtattgttttggaagaggaaaaagtataatgattagttaaagatatatgttataatttttagaaaggagattattattaaatagaaaataaaagaatatattttatagaaaggaaatttaaatgataatattaaatagatttaaaataaggtaaaagtgaggataaaaaagaaagatggaattaatggggtaaatagaaaaagtaagatagcgtggtagggtattaattttagttttatattaatgtataagtattttaatattttattgtaaagggaaagtaaagattttttatagtttgagtgtaatggagaaatttagtttattatagtgttttaaatattgtaagtttttaatttttagttgatgaataaatgatggaatttttagtgatattgtattgttattaaataaatataaaaggagtttttggaattggatgtaatataggtaaagaagtaaatatagttatataggtatggttttttgtagggataattttgtgaatcggtttagatagatagataggtaaatatattttattgttttatatatgttatttgttttagtttttgttttgaatttttttatttttttaagtatttgtatttattttattaaatttttttttattaga

SEQ ID NO: 138 - DNA, 7892 bp, Artificial Sequence
  chemically treated genomic DNA (Homo sapiens)
tttaataaaagagaatttgataaagtaaatgtagatatttgaaggagtaggaaggtttagaataaaaattaaagtaaataatatgtatgaggtaatgaggtgtatttgtttgtttgtttgtttgagtcgatttataaagttgtttttgtaagaagttatgtttatatggttgtgtttatttttttatttgtattatatttaattttaggagttttttttatatttatttgataatagtgtagtattattgagaattttattatttatttattaattagaagttgaagatttataatatttaaagtattatgataaattagatttttttattatatttaggttgtaagaaatttttattttttttttatagtagaatattgagatatttatgtattgatgtaaggttggaattaatgttttattacgttattttattttttttatttgttttattggttttattttttttttttatttttatttttgttttattttagatttgtttaatattattatttagattttttttttataagatgtatttttttattttttatttaataatgattttttttttagggattatgatatgtatttttgattaattattgtattttttttttttttaggataatgtaatgattttagaatttttaagttttttttttatttatttttaatttttatattgttattgttatgtattttaattttttttgtatatttatgatttttttgggaatattatttttttatgagttgatatttatttagttttattaaaatatttattatttttttgttttttgtttttttttatattttaaagttatttttttggattattttttttttatttaatgagtatttttttatttattgttttttttttgttttttttagtttgtgataaatttttttagttttttttttttgaaaatttattttatttttattttgaaaaattattagttatttatgggtttgttttattaaataaatattaaaatttattattaaattatggtaattagagatatgtgttttggaatgagatagataaagtaaaatagaattaatattttataattgatggaattagaattcgaatttagggagtatttttattcgttatgattagtagggaagtggagatggagaatatacgttagatgtattagagagttaaatatagttattttttaatgtattttttagtttattgattttattatttttttattgttttttattttttttatgtttttttttttaatttagtttgaaaatatttataattttttagttttttttttttattaggtttgtttagtaaaattataattttggataatttaagttattgagttattgtgaatttatattatgtagtagaatatgtttgaagaaaaatataaagttatcgggtttgtttcgttatgaatttatatggttttatattgtatatataatgtatttattatgtttattatttattgtttattttgtgggatgtaagatttatgagggtaaagattttgtaaaatttattatgtattttaacgtttattgattaatagttataagatgtttttttagtttatttatttatttgtttttttaataattattttatatcgtttgtttttttaaattttgtttttttatatttttatattttgttaaattatcgtgtttattttattgatgaagttgaagtgtttagaatggaattttataattttttattatgatatttttttatttattagtatttgtattaatattttgtttttgttgtttttgtaaatgaattatttatgtttttttttgtagttagtttttgtttgtatgtttattttgtagattttatttttttttatttttataaggagttatttttttttttttgttttatattattaatttttttatgtttgttggattttttttgtgagtttatatatatattgttattttttttattttgaaaaataaataaaaaattttttttgattatattttttttgttagttattattatatttttttttttttttttggagttaaattggttggtaaagtttattattttttttaatttttgttgttttttttgaaatttattttaaatagaagtttgatttttttatattatcgaaattatttttataaaagttattgataatttttgttttgttaagtttaaagattaattttttgtttttattttatttgataaatttaataatttgatagatttattattttgtttttttgaatatattttttttatatagattttaggatattatatgtttttcggatttttttatgtttttttgattatttttttttagttttttttgatgtttttttttttttttttttttttaattatttatttaatattggagtggtttaaggtttattttttggattttttagtttattttcgttatttttgttatgttagttagttatatagttttaaatattatttgtatcgaataatttttaattttttgtttttagtttaaaatttttttttgtatttttgatttttaaatataagtgtatttttgatatttttatttggatgtttaatagatattttaagtttaatatgtttaatttgtttttgattttttttttaggttgggttttttagtgaatttttgtatttagttggtagttttagatttatagttgttaataaaaatattggaattattttgtatttttttttttttttgatatattataattaatttgttaggaaattttgttgtttttatttttaaaatatatttagaatttgatttttgttttgtatttttagttttattattattatgtaagttattattatttttatttgattttttataatagtttgttaattgtttttttgtttttgttttttttttttttttcgtttttgtttattgttaaaagtatggtttggatgatttttttgaaatgtgagttatattatattatttttttttttatatttttgtggtagtttttaatttatttagttatggtttataatgttgtgtttttttcgtgatttttttgattttatttttatttattttgtttttgtttaattttattttagttatattggttttttggatattatttagataagagaggtagtattttattttagggtgtttgtattagttgttttttttgtttaaaattattttttttaaaatattgatatggaggatatttttattttttaaaaatttttttttaattagaagttggattttgtatttttaggatttttagttttttttattttattttgatttttttttttatagtatttattattttttagtatattatattattaaagaatttattatgtttattgttttttgttattttagtagtatataagagtcgtgagagtaaaaatattaatatgtttttattttattcgttggaatatttaataattgttgtttatatttattatgtgtaaggatttgggttaaggttttaggataaaaagttttaggtatataaagaaggatttaaataaggttaatgtaaaagttatttagattatatagtattttatgaatttatagagtttattatatatatatattattttatttgatttttaaaataaggagtatgtttaaggtaaataagtgaggaattattatttttagtttagaggtggggatattaaagtgaattttatatagttagtaaataatggaattaggtttttagttttggttacgtgattttagttttttattttgtatttttattgaagattattgttagatagaagttttatttgttgtatttttagtgtttatagtattagtgggtttagtaaatgtgtattgaatagattaatatttttgaattatagtataaaagggtttgtataaaaagaattttttataagtaagagttaatagagaataataaattttatttattaaagtatttttaaattatatttaaatataaattaattagtaataattttttttaaagagggtgttatgatggattttattttttgttttgttgatttatattttgataaatatgttttgtggtttttttttttattatattgtatttgtggttatttaataattttttaaatttttatgtttgaagatagtgaaaatttgattattttgtttgtatttggttgtatttaattatttttgaattatttttaaatttttggttattaatgttttttatttttgtttaaattatttttttagagtttatagattttaattttttttgtttttattttttttaatttatgttatattttatattttttttaaagttttttttttttttttaaaaaattttttttattgtttgatttagaaattttttgttttgtttttgattttttttttaaaaatattatttttttttggtttcgttttttttttgtttattataaaatttatttaattcggtttagtatatttaaaggtatttataaagatgttgaagataagggtaatattgatttagttttttttttttttgttttttattaaatttttttttatatttttataaattagggtggatttgtaaaggtattatgataagaagtagttagaagaatttgttattaattattatgttatattatttttgttaacgtggattaatgggtatattgagagttttaaggttatattgtttaatgaaatttttgtgttttgtgagagtaatgaaaattattgggtggatagggagggttgtaaggtgttaaggttaacgatgaaatggataagtaagagtagggttattaggtttaaggttattgatatttattaatttttaaagttattttaaagttaacgttttttaaaataaaagaatgattaaaggaagttttttaaatagaaaattataaataggagaaatttagaatatttagaataaagaatatggttaagaaaaatattggtaaatataagaaatttttttttttttattgagttttttaaattattttttatgggtgaagtaaaaattatattattgtttgatgtggttttaaatataagtaagggaaatatataagataattataagtgaatgagagagagtaaagggatataagggagataagatttttatattttatttaaataagtaaaatgatgaaaatagtaaagtatgataagttatttatatataatgtaatatttagaggattattaaaaaatttatataaatagatatagttaagattattataggtagagaagaagggtagggtaagatggttgaatagaaggatttattgattgtttttttttataagaatattaaatttaaataattatttatatataaaaagtaattttataaaagttaaaaattagatgagtatttatagtttttagttttaattttatatcgttgaaagaggtattgaagagggtaggaaagatagttttgaattgttgatgttattttttatttttttagtagtggttatattgtgcggagagaaaagttatgtgtttgggagagggagagtatagagattgtgagattgtgtattgaatttagtgtttttttgttatagtataaagtaaagttgggttgaatttagttgatatttgtttatagagggagtatttagattaggtttagttagaggggaattatttattttagttgtcggaatttgagttttattaagttttattattgtgggttaaaatgttttggggttttaaataaatttgaaagttagtgtaggttataaggattgtaatttttaggtgatttttagtgttaagttgagtttagagttagtggatttggggaggtatatgatttacggagatattagttggggtagttaaggaaatggtttgtattattttttttttaattttaggtagtatagtttatggttttaaaagagattttttttttttgtttgaggagaggaaagggaagagtaaagaggattttattttgtattttggttattagtttagttatagtaggataggggattggttagagttatgagatttatattttaggttttagtttttggatatttttagatatacgttggataagaagggaatttattgttttgaagggaaggaattagttttagtaggatttattatttgttgatttttgggtttcgaataattattagtgatgtttagatagtacgttatggatatggattttgggtaggattttgagatgtgttggttttaggtaagatttagtatattattcgttatggtggcggtggtgagagattttttgtttgagaaaagtaggtggaaaagtaaaggagattttgtattgtattttaggtattaattcggttatagggttaaagtattaagtaggtttttggaatttaggttttggtttttttatggtatttttggattcgttatgagtagagggtgtttattgttttaaagaatgagttttagatcgggtagtatttattataagttgattgaaaaatttttgtgttttaagtgaatcgtggtagtagtttggaagtatttttttgggtttgtggtggtgaaggttagggggcgaggtttttttgtttgtggaaaggggagggaagaatgtgtttagtggtttgagtgttaattaaattgtatattaagtagatttttaaggattttgattttagtttttggtttttagattatattttttaatttatttagggtttgggggaatttattattttgaagggaaggatataaacgtggttagatttattattagttgattatagagttttaaggttttgagtatatattggtagttaggtagtggttatattaggttttgagtaagatgtagtattgtgttgattttaggtttgttttagtgtagttttagtggtgtagttatagaggaatttgtgttattttattttaagttttaggatgtttagtatagaaaaagagagagggagagagagagagagagaatttgtttgtttgggagaaagtaaaagaagataataagagtttttgtttggtaagaaattttttggattttatttaagattattaaggtagtatttttataagtttgtaagaaattataatgttattgggtttagggtgttttttaatgtagatatagtttagattaaaatatttaagtatttttaaatatttagaaaagtttttttaagaaagatgggtataaataagttcgggttgtaaagattaaaataaatatttaatattttaatgtttatatattgatcgatatttataagtattaatattatttaggaaaatatgattttattaaatgaattaaataagttatttgggaataatattgaagaaagagatatgtgatttgttaggtagagaatttaaaatagttgttttgatatatagattaatgaaatagaatagagattttagaaataatatcgtatatttataattatttgatttttgataaatttgataataataagtaatgggggaaaggattttttatttaataaatggtgttgggaaaattggttagttatatgtagaaaattgaaagtggattttttttttataatttatataaaagttaatttaagatggattaaagatttaaaatttaaaattataaaatattagaagaaaatttaggtaatattatttaggatataggaatgggtaaagattttatgatgaaaatgttaaaaggaattgtaataaaagttaaaattgattaatgggatttaattaaattaaagagttttgtatagtaaaagaaattattattagagttaataggtaatttatagaatttgataaaggttaaatatttagaattta

SEQ ID NO: 139 - DNA, 7441 bp, Artificial Sequence
  chemically treated genomic DNA (Homo sapiens)
ttaaaatattttgttaattttggaaaagagagaattttttgtttagtttgtggaggcgggagggatagaaggagggagtatgtggtttgttgtgagtttttgtatttaggggtaagagttaggtttagataggtgattggggggtgtatatttgggtttttttaggggagatttgatatttttgttttgttaagaggtttaaaagggagatagtatgtatgggtgttgtagtttttttgagacgggttatataggagtagattattaatatattaaagaagagaggatgattttagggataaagtatagaagttattagtaagggtttgtttaaaaaggtgggggttgtttttaaaattttgaggtagtacgtattaggtgagttgatttgaaaggtgggtgtcggggtttttttaggtaaaggtaaagaggttttgggaattagggtgtaaaggaattgtgaaaaagtattatttaggtttagaatagaaaaatgggtggtattcgagggaagtgaggaaagtaaagtatatgggttagaaattattggatatattgggagtatagtttggttaatgagtttgaggttttggattaagtgataagttttatttggttttttaataggtagaattgatgtgttaaaaggagagtttgttgggtagagtaggtgattggtgaggaggagagaaatgataggttttaggtttatgagagttgtttgggggatgagatattgtttttgtgataggaacggggtgggttttttaagggtgatgtggatgggggtgtggtgttttgtgatcgagggtgtggaagtattttaaatagtggggttaattataggtgcgggataaggaaaagttgtatgttttagggtgggaggtcggaggagtagaagaaggttagaagtttgttagaagttttggaggggtttgggttgatgtgttgggtattatggggaatgtggaagtggagagtagtgtggagttttgaaagaatatttttgtttaggagcggagttgggtatgaaggtaggattaagaaagagtgattgaaggaaaaggtgtttagggagtagaaaagtggaggggggttttggggtttggagatttgtttattgatttttataatagagatttgggaggattgggtgggttttgaaaatttaggtaaagtagagtaggttgttttaatattaatttttaaaaaatatgtatgtttatttgttattattagagttatttttggtttagatgaagtaatggtagttgttgggatatttgttttagggtattgttagtttttagtggtaaggtcgatgagattcgagtaggaggttttggttagttcggaaagggatggaggcgatttttgttggagtcgtttatagtttgatttttattgagttttttatagagggggtatagtttggtgagtatagttgggtttgggtatggtttggattagtagtttttattgttatatttgaaataggcgttaggtggaggtgttttgttaggaggtttttgtatggagttgtggttttgtgggtttgtagggtaaaggtaagtattggaaattgttttttttttttattttttttattataattgttaaagattttgaaggttaaattaagaaggttttattgtggggtttgagggtcgttattaattttttgaagtttgcgttaaatattatggtagattgggtgaggaattgaaggtttgaaatagtggttttttttgggttggttgggtttaggttggtaatttttttatggttttagttaaataagagagaaaaagggttgggtttttgttaggattttcggtgatttttgaaagttttttatagtttattattttatgggtattttttttgagttttgtaaggagatatataattatgaggttttgatggttgtgtttagaggttttgttttgataattttagtgggggttttggttgggaattgtttttgtgttagtaggttgggtaggagtttgatgatgaattgtattagtatgtatttgagttagggtttaagtacggtgttggttttttggggtgagggtggaagagaagataagtagttgttatgttaggttagtttataagattgagtaaggtattgaatttttttaatataagaggtaggattttttggaaatgaattgagttttttgttagtttgagagagattagtgagggagaagggaatatgaattttaataatatttttagtttttgttatttttcgaagggggtattttagtattggcgttaaagtacgggtggggtatgggggttaaagatggtgtcggagttagtatgggtaggagagaaggaagaagttagaaggggtttttgttgagggtttgaagagggaaggggggttgagttgataggtattggaggatagatacgggtgtaaggtggcgggatgggtttataggtttcgtgagagggttgtaaggaaggagaatgagtataggtaatgttagagtttttttgaggagaggatggtataggaaaagaagtgggtgatgttggttgggaagatggtggttgggaagatggtggttgagaagataatgaggaagtttggggagttaatgaagttggttgagatggaggggtagggtttgggaggggtggatagtagtttgttttatttaatgaggaaaaagaggtagggtcgggaggataaaggtaatgagggcggcgagaatgaagaaggatttgaataggtaagtaagaattgtagaggtcgggttgtgatttgagtgtaaaaaggtttggatataaggaatttttttttatttttttagttatttgtaataattgtttaagttagttaaaattgtaaagttgagtgttttatttgcgggttatttggattcgttatttaatttatattgcgattaggttttatcgtataaaaaagataaggtatttatggtagatattttgtttgaggtttaaggtttgtagatttttaatgaggtaggttggagggttgttttttggaattgaggatcgggagttttttataatgaagggtagttcgagagaatagggaaaaaggagattattttggatagttggagggagacgataaaaggagttatcgttttcgttgtttttttggtttttggaatgggatgaaatggtttagaggtatttttttaagattagatgattagcgagtgtttggcgtacgttggcgtttttttggattagtgttggatttttggattggagaaattaagagaggttatgtagattttgttttgttaatcgggttttaagggaaatttattagtaggcgagattagtggttgatgcgtatgtatagagaggcgattggaggttgaggagttttttttgtttaattgttgtggtttgttttttggggtggaggggtaggtttataagcgatatagatttgagttttttttaggatttggtattagatgtaaggtttttgaattagtttgaattttaatagcgcgttaatagataataggaggcggtgtggagtaatatgttgttttaatgaacgtttggttgtaggtgggttgaggtttaaaatggtattagtttttagtgaggatgggataggggttttgtagttttttgtaaatagtaagtgttttagtttgttgtgattgttatgtagtatttggatggtttattttttgatttttaggggtatattttttttagttagggtaagtgttttttggtcggttttttttttgtttttgttattttgttgatatacgttgttgatgtaagtggttttgtattttggggttgggtttgagaagggaggagttatttatttttttaagtttttaggttttgaggagaatttttgaattttttgtattattggttatttttttgatagatttttgtgatgttaggtaggaatgagtcgtttgggtatttagagagtttttagtgtttttttgttattttttttatttttgtattttgtttggtttggttttttaatttgatttagttttatataaagttaggaattttttttgttaatagaattttagtttttttagtggggatgtgtattttggagagggggattatttttttttatttttattgttggggtatttatagtgtttgggatgttttttaggttttgtaggagtagtacgttttttgtagagggtgtgtggatttttttagaattgttggtttgtttttgtagttgatttgtagttaaaatttataatgtaagtttttgtatgttgttttgtttggagttgtaatttagttttgtattttatttgttatgattattggaaaatttttatttattttttaaagggtttagaaaatgttaatttatagagatagaaattagattagtggttgtttagggtaggatggatgtaaaattttagagtggggggttagaggttattgtatagaattttttggagataatattgattattgtagtgaaagtaaaattttgtgaatatattaggaaatattgaattgtatatattaattggtgagttatatggtatatgaattatgtgttaataaagttttagaagatattatttgtattacgatattaaaaaatgtcgtttgagttgtataattattttttttttttatgttaagggtatcgaataggtaggagttttttatttgttattgtttttaatagtattataaaataattatataagataggttatttatatattttaggttataaaaattattgtttgattagagtaattgtaaatataaaagaatattaaatatattaaaataaatatgaggttattaattttttgttggtttttttggtatgtatttatttagattgttagtattatgtatttattttaaattttagtagttatattttaatttgattgatttttttttagatataagtatgagaaatgatagaaagaaataataattggaaaagaagtattgtataagattaggatgtttttgaaatggacgttagtttttttgttgatatagtttagttgttattttagttttggaagttgtggaaaggtgttagtgtggtttatagaatatagttattggataaatatgaagataattttggaagagtttgtttagaggggttatgaggtgattgtgttgatattttcggtttttatttttgttaatgttagtaaattatttgttattaaattagaagtttattttatatttttaattaaaaatgatttggaagatttttttttgaaaattttcgatagatggatatatggtgttttaaaaaatatattttggttatattttttataattataagaattgtgttgggaatattatgattatagtaataagttttgtaaagatgtagttttgaataagaaatttatgatgaaattataagagttaaagtttgatgttattttggtagatgtttttaatttttgtggtgagttattggttgaattatttaatatattttttttgtatagttttcgattttttgttggttatatatttgagaagaatggtggaggatttttgtttttttttttttatgtatttgttgttatgttagaattaagtgattaaatgatttttatggagaggataaaaaatatgatatatatgttttattttgatttttggttttaaatttatgatttgaagaagtgggattagttttatagtgaagttttaggtaagttatgtgtttaattggtgtttattaagttttaatttttttgtgtttttgaaggtgagtttatataaatataatgttagaagatagtgtttttaagggaaattatgaattgtaaatgtaagatgatttattagttttaaaaatattatagaatgttgattttatagaattagttagaattttggggttattattattataggatatttagagagttataaatttttattgtaaagtattaatgatttttttaaattattatatattattttgttatatatttttttatttttaaaaaaagttaatagatattttaagaaatatttttatgaaggtagatacgtaaatttagtatttatatatatttttagaaaaattattaatgtaggattgaggaatttgtttttttttgagttttttagtttttttatttagaaattaaattttgttttttatgtaagaaggatttttttatagttgagtaatatagtggttttattttagaaatagaagtttaaaatttgagatttttaatgtttatatatttttttaataataggttgataattattttttttaaaaattgaaattttgttgaaagtgaatatttaagttttaatttatattttattaaattgtatttttttattaaagaaaataggggttaaattaagggagagtatatatttttatgttaataaattttgaaaatgttttaatttttatttgtaaatatatttattttaaaaatttaattatattaagattttaagatgaattaagatagtagtaggtgtaaagattttagtgttgagtttaaaaaatttatggtttattttgagaattaaggattaagggattagtttaataaattgtagatattagagtattttttggaaagttgtttttatgggtaaggtaagatgaattaattgtggaattgaaagagttgtttaaaggtatatttgttattattgtagttttagagggaagataaatgtgtatttaagtttatagtggttatattagtttatttttatattgttgtaaagaaatatttgagattgggtaatttataaagaaaagaagtttaatagatttagttttatatgattgggatgttttaagaaatttagaattatggtgaaaggttaaggggaagtaagtttggatttttttatttagtggtaggagagagaagtgtaagtaggggaaatattagatatttataaaattattagattttatgagagtttatttaatattatgagaatagtatggaggaatttatattatgatttaattatttgttattgggtttttttttggatatatggggattatggggattataatttaagatgagaggagatttgggtggggatagttaaattatattagtgatttattttaataattatttatgattgtgaatatattgatgttatattaaagatgtgatttttttttatagatttttgaatatattgttttttttatatatatatatgagtaatatatgtaataaataaaatttaaattatgattatatataaatgtatttatatatattttattaatgtatagatattttatatatgtttgggtatgttattttaagtttttttaggaaaatatttgtatatttaaataataattttcgtgttagttattttttgttttgttttgtttttttttattagg

SEQ ID NO: 140 - DNA, 7441 bp, Artificial Sequence
  chemically treated genomic DNA (Homo sapiens)
tttgatggaaaaaaataaaataaaataaaaggtagttaatacgagaattgttatttgaatatgtaggtatttttttgaaaggatttggaataatatatttaaatatatataaaatgtttgtgtattgataaaatatatataaatatatttatatatagttataatttagattttatttattgtatatgttgtttatatgtatatataaggaaggtaatgtatttagagatttgtaagaagaaattatatttttaatgtaatattagtatatttataattataaataattattaaaataagttattaatatggtttgattgtttttatttaaatttttttttattttgaattataatttttataatttttatgtgtttagggagggatttagtggtaggtgattggattatggtgtggatttttttatgttgtttttatgatattgagtgagtttttatgagatttgatagttttataagtgtttggtattttttttgtttgtattttttttttttgttattaagtgagaagatttaagtttgtttttttttagttttttattatgattttaagttttttgaggtattttagttatgtagaattgagtttattaaattttttttttttataaattatttagttttaggtatttttttatagtagtgtgagaatggattaatgtagttattatgaatttaaatatatatttgttttttttttgaagttgtaatagtaataaatatatttttaaataatttttttagttttataattaatttattttattttatttatgaaaatagttttttaggaagtattttagtgtttatagtttattaagttagttttttgatttttggtttttaaagtaaattatgagttttttgagtttaatattgaaatttttatatttattattgttttggtttattttaagattttaatataattagatttttaaaataaatatatttataaatgagaattaaaatatttttagaatttattgatatagagatatgtgtttttttttaatttggtttttattttttttgatggagagatgtagtttaataaaatatagattaaaatttagatgtttatttttaataagattttagtttttgaaagaaataattgttaatttgttattgaaggaatgtataaatattagaaattttaagttttaggtttttgtttttggagtagagttattatattatttaattgtgaaggaattttttttatatgaaaaataaaatttaatttttaaatgaggaaattgaggaatttaaagagaaataaattttttaattttgtattgataatttttttagaaatatgtgtaaatattaaatttacgtgtttgtttttatgaagatgttttttgaggtatttattgattttttttaaagatgaaaaaatgtatagtaaaatgatatgtgatagtttaaagaaattattagtgttttataatgaaggtttatgattttttgggtgttttgtagtagtgatggttttagggttttaattgattttataaggttaatattttataatatttttgagattgatagattattttatatttgtaatttataattttttttaaaaatattattttttgatattatatttatataagtttatttttaaaggtatagaaaagttagaatttaataagtattagttagatatatgatttatttagaattttattataaaattggttttatttttttagattataaatttgaaattaaaagttaaaataaagtatatgtattatattttttattttttttatgaaaattatttgattatttaattttgatataataataggtatataggaaggagggaatagaaattttttattattttttttaaatgtgtagttaatagagaatcgaagattgtatagaaagggtatgttaaatagtttagttagtagtttattatagggattaagggtatttgttagaatgatattaaattttgatttttgtagttttattataagttttttatttaaaattgtatttttatagagtttgttattgtagttataatatttttaatataatttttgtaattgtgaaaaatatgattaaaatgtattttttgaaatattatatatttatttatcgagaatttttagaagagaattttttaaattatttttagttaaagatgtaggataaatttttaatttaatagtagatgatttattggtattgataagagtagaagtcgaagatgttaatatagttattttatgatttttttgaataagtttttttaggattgtttttatatttatttaatggttgtattttgtgggttatattagtatttttttatagtttttagagttaaagtaataattgagttgtattagtagaaagattgacgtttattttagagatattttggttttatgtaatgttttttttttagttgttgtttttttttgttattttttatatttatatttgaggaaaaattaattaagttaaaatataattgttaaaatttgaagtaaatatataatattaatagtttgaataggtgtatgttaaggagattaataaaagattgatgattttatatttattttagtgtgtttggtgtttttttatgtttataattattttagttaagtaataatttttatgatttagaatatgtaagtaatttgttttatgtaattattttataatattgttaagaatagtggtaagtgagaggtttttgtttgttcggtgtttttgatatagagagaagaagtaattatataatttaaacggtattttttaatatcgtggtgtaagtaatgttttttaaaattttgttgatatataatttatatgttatatgatttattaattagtgtgtatagtttaatgttttttagtatatttatagaattttatttttattataataattagtattatttttaaaagattttatataatagtttttaattttttattttgaaattttgtatttattttattttaggtaattattaatttaatttttatttttatagattagtattttttggattttttaaaaaataaatgagggttttttagtgattatggtagatgggatgtaggattagattgtagttttagatagagtagtatgtagaggtttgtattgtgaattttagttgtagattaattgtaagaatagattagtaattttgagaggatttatatattttttgtaggaagcgtattgtttttgtaggatttgggagatattttaaatattgtgagtgttttaataatggaagtgggaaagggtgatttttttttttagaatatatatttttattggagaagttgaagttttgttggtaggagaagtttttgattttatgtgaagttgagttaaattagagaattaagttaagtaaaatataggggtagaggaagtagtagaaaggtattgggagttttttggatatttaagcggtttatttttgtttggtattatagggatttattaggagggtggttagtgatgtagggggtttaaagattttttttagggtttgaaggtttgaagggatgagtaatttttttttttttaggtttagttttaagatgtaagattatttgtattagtagcgtgtgttagtaagatagtagaagtaggaagagagtcggttagaagatatttattttggttggaagagatgtatttttgaagattaagaaataggttatttaggtattatatagtagttataatagattgggatatttattgtttatagaggattataaaatttttgttttatttttattgggggttgatgttattttaggttttagtttatttgtaattaggcgtttattaaaatagtatgttgttttatatcgttttttgttgtttgttggcgcgttgttggggtttaaattgatttaagaattttatatttggtgttaaattttaggaggggtttaggtttgtgtcgtttgtggatttatttttttattttagagagtaggttatagtaattagatagaggaagttttttagtttttagtcgtttttttgtgtatgcgtattagttattgatttcgtttattggtaagttttttttggagttcggttaatagggtaaaatttatatggttttttttggtttttttagtttaaaaatttaatattgatttaagaaggcgttagcgtgcgttaggtattcgttggttatttggttttagggggatgtttttaagttattttattttattttaggaattaaaaaggtagcggagacgataattttttttatcgtttttttttagttgtttaggatggttttttttttttttgttttttcgagttattttttattatgggaaattttcggtttttaattttaaaaaatagttttttagtttgttttattaaaaatttgtaaattttaggttttaggtaagatatttgttataagtgttttgttttttttatacgataaagtttggtcgtagtatgaattagataacgggtttaaatggttcgtaaatggaatatttagttttatagttttaattgatttaagtagttattgtagatgattgggaaaatggggagaaattttttgtgtttaggtttttttgtatttagattatagttcgatttttgtaatttttgtttatttgtttaaatttttttttattttcgtcgtttttattgtttttattttttcgattttatttttttttttttattggatggagtagattgttgtttattttttttagattttatttttttattttaattaattttattaattttttaagtttttttattgtttttttagttattatttttttagttattatttttttagttagtattatttatttttttttttatattattttttttttaggaaaattttagtattgtttgtatttattttttttttttatagtttttttacggagtttgtaaatttatttcgttattttatattcgtatttattttttaatgtttattaatttaattttttttttttttttaaatttttagtaggaattttttttggtttttttttttttttttgtttatattagtttcggtattatttttggtttttatgttttattcgtattttagcgttagtgttagaatgtttttttcgggaagtagtaggaattgaaggtattgttagagtttatgttttttttttttttattgattttttttaaattaataaaagatttagtttatttttagaagattttattttttatattagggagatttagtattttatttagttttatgaattaatttggtatgatagttatttatttttttttttatttttattttagaagattagtatcgtatttggattttagtttaggtgtatgttaatataatttattattaagtttttgtttagtttattggtatagaggtagtttttaattaggatttttattgggattattaagatagggtttttggatatagttattaagattttatgattatgtgtttttttgtaggatttaaaaagggtgtttataaagtggtaaattatgaaaaatttttagaaattatcgaaggttttgataaaaatttagtttttttttttttttgtttaattgaagttatgagaaaattattaatttggatttagttagtttagaaggaattattattttaaatttttagttttttatttaatttattatgatatttggcgtaagttttagaaggttgatgacggtttttaaattttatagtgggatttttttaatttagtttttaaagtttttaatagttgtgatgaggaaagtaaaagaaaaaaatagtttttaatgtttgtttttattttgtaggtttatagggttatagttttatatagaagttttttagtaaaatatttttatttggcgtttgttttaagtgtggtaatgaaggttattggtttaggttatgtttaaatttagttgtgtttattaggttgtgttttttttgtggaggatttagtgaaagttaggttgtgagcggttttagtaaggatcgtttttattttttttcgagttggttaaaattttttattcggattttatcggttttgttattgaagattgatagtgttttggaatagatgttttagtaattattattgttttatttgagttaagggtaattttgatggtggtaggtaggtatgtatgttttttaaaaattaatattggagtaatttattttgttttatttaaatttttaggatttatttagtttttttaagtttttgttgtgggaattaatggataagtttttaaattttaagatttttttttatttttttgttttttgaatatttttttttttagttatttttttttagttttgtttttatgtttagtttcgtttttaggtagagatatttttttaaaattttatattattttttatttttatattttttatagtatttaatatattaatttagatttttttaaggtttttaataggtttttaatttttttttattttttcgattttttattttgaaatatgtaatttttttttatttcgtatttgtagttaattttattgtttgggatatttttatattttcggttatagagtattatatttttatttatattatttttaaagagtttatttcgtttttattatagaagtagtattttattttttaagtagtttttataggtttaaagtttattattttttttttttttattagttatttattttgtttaataaattttttttttaatatattagttttatttgttaaaaagttagatggaatttattatttagtttaggattttaggtttattaattaagttgtatttttagtgtgtttagtagtttttaatttatatattttattttttttatttttttcgaatattatttatttttttgttttaaatttaaatgatgtttttttataatttttttatattttgatttttaaaatttttttgtttttatttgggaaaatttcgatatttattttttaggttagtttatttggtgcgtattattttaaggttttagagatagtttttatttttttggataggtttttgttagtaatttttgtattttatttttaaaattatttttttttttttaatatgttaataatttgtttttgtgtagttcgttttaaagagattgtaatatttatatatattattttttttttaaattttttggtagaataggggtattaggttttttttaagaaagtttaaatatgtattttttagttatttatttaggtttagtttttatttttgaatgtaagggtttataatagattatatattttttttttttgtttttttcgtttttataaattaagtaagaaatttttttttttttaggattagtaggatattttaa

SEQ ID NO: 141 - DNA, 7025 bp, Artificial Sequence
  chemically treated genomic DNA (Homo sapiens)
  unsure (198)
aagaaattttggatttaagtttgacgtttgattaattggatttaatattttgtagaatattttattttataattatgaaatttatattttatttatttttatatgaaatatagtttaagattaataataatttttgttatgaagtaagattgaatatatttataataattgaaattattttaaatgtaaattataggnggaggtataaaatgttttgtaaggaaaaggatattatgttatttttaaataatggaaaaatgttattttttaatagaaaggagtggattttttttgtagattcggagtttaggggagtttagaaattgaagattttaattgtaatgaattattttttaaatgttttataattttattttatttaaattgagattttgaatatggttagtgattagattaggttgggaatttagttagaattgagttgggtttatttttaaaatttagttttggatttaagatttagatttatttggtggtggggatcgggtgtttttatatgaagtgagagtttttgtatatgttgtagttagggaagtaggagttgaggagagatagagtaatgtgattttaagtttagttttttataaatatatatatttgtaatgaagagtttagatgttttaatatttaaaacgatatatgattttaagataataatagttatgttttgatgtatttatataagaaagtgttaaggatagtttttttggtataaatagaataattagttttgttttgttgtttgattatttataattagatatagtttaattaatttttatagagatgagatttttatataagaaaaatttaaaataaaggtgttgtatttaattttttgttttttgaggatgttttattttgtaatgttatagtttttaatgaattgtttttttattgtattttgtgattgattttgaattttttattgtgtggaatttaataatttttttttggtgtttgaatttagatttttttttttggtaatatttttaaggagatttttttggtttttatcgtttgttttaatttgatggttattggtttttatttttttattatttttttttaagtattaattttgtagaaaaaaatatttgtttttattgtggttataatttttattttttttatattgataaatttgtgatatattttaataagtaaagtttttttttttaaaatattattagtataatttattattattgaaagtatgaaaaatttaaattattatattttaggggttatttgtgttttttgtattaatagtgataggatttttattataattggtagtgtatgatttaattttaaaattttattttgttgtttgtttttttttttttgattttttttggtatatattattaaatgttgggtgtttttaagaagtagattttaagttgaatattttttgatggagataattagggagattttttgaaaataatatttgtgaaaaagtaggaagtaagattggatagtggaataaaatagtatataatttagtgtaatagtttgaatgtttgagtgtttttaaaattaatatgttaaaatttttataattaaaatgattgtattagtagatagaattttttaggaggtgtttatgttatgaaggtagagttttgtttaatggaattaatttttttgaaaaatatgtttataataatttatttatttattttttttattaagatatggtgacgggttgttattttggaggaatgtttaatattagtattttgatggtgaattttttagttttaagaattgtgataaataaatgtttgttgtttgtaagttagttaatgtatggtatttttttatatagtattttgagtatgttaagatatgtagttttagtataggttttattttatttattggaaattttgaagttaagttagttttttagagttggtttaagttgaaatgaggagaatgggtttttagagttttatatgtgattaggtattggatattggttgttttggaaaagttattatatattagatagtttttagtagagatgtattgagagagagagtttataggtgaggtatgttagttgtttattattttattagttggaaagtaatttttatatttttaaaagggaaatttgggtgatatataatgtttgtatttaaggatattgaaaatattgaataatattgttattttgtaggtaatatttgtttagaaattgtgtttaaatatttttttaagaaagatttattttattttagattaatagattattaatagaataaaaataaatatttttattttgtgatatgtatttttttttttttaattttatttgatgtaaatttttatttagattttttaaaagtataatttgtttgaattataaggtaatttgtgaaataagttaagtagtaggtatttagaagataaatattttttaagattgagaaatgtaagtaatgttgtaaatatttagaaaaggaaattattgtgatttagataaaatatttttaaatgaaataaagtaattgtaattgtatttaaaatatatttgtttggataaaaataaaaggaatttttatagttagaaaaataatgttaaggaatatgaaatgaagttaatataataagtgtgaaattatatagagaaaatgaagatattttatttgagaatgtttagataaataagaatagattatattattgttttattgttgatagaatgatgtttttttatattagaaattttttatatataattaaattattttttgttttggagatagttatatttataataagtaaataataataaatttattatttatatatataaatataaaattatttatttttttttttatttttttgttttttaaaaattttattgttaatatttaaattattgtgatattgattgatattgatatgtattaagttagagaaagttagaaagaaagatagtattttaataagttgtttaagaaatgggtttttttgttttttatgttgatagttgtattttagttttgagttttgtgagaatgtgttggtgtggttagtgaaatatagtttttatattaatttaataatgatatttgatgaatttgtttagaaatattaagaggtaattgtgtttgttatttttagtttttatttttattgattttaataatttgttgttaaatttgaggtttattttatattttttattgagaatgaatttgattttatttttatgaaattgattaagatatggatatataagtttttaaagagtatattttggtatatgatttaaagatataaaaaatatatattatgaatgttttgatattgtttaaaagttttgtgagtatgttgttttgaataagaaatttataaggaataataagattttagaatttatgttatttttgtagatgttattttttattagtgagttgttatttgaatagtttaatttgttaaatatttgttatatatttggtttattattatttatttataattggtagtatgtattaagaattttgtggaggatttttattatttttttttgatgtagttgttgttatgttagaatttagtattaaaatatatttatagaaagatgaaaaattttttgtattttttttattttaattttgtatttgataattttaataaaaagaagtgtgattagttttatagtgaagtattaggtaagttagtggttaatttatttttttttttttttaatatgtggaaggaaatttttttttttttgtgtttgttagagtgtgttaatgaattaaaatagaaaataattttttttgttatttgaaagatgaggtttggtaagttggtggagatattgaaatttttatatattgttggtgagaatagaaaattatttatttattgtgaaaaagtttagtaattttttaaaagtttatatatatatttattatataatttaataattgtttttttaggtatatatttaagaaaaataaaaatatgtttatagaaagtatgtatattaatgttaattaacgttatttataatggttaaaagtggaagaaaaataatgttcgtatattgataaatgaataaataaattgtgtttataagtagtatttgatattatttggtaataaaaatgtgaacgttatttataatggttaaaagtggaagaaaattaatgtttatttattgaaaaatgaataaataatttttgtttataagtagtatttgataaaaagtaataaaaatgaaatttttatatatattattttatggatggttttttaaaaatattaaattaaataaaagtagttagttataaaagattatatattatatagttttatttatttttaaaaagattttgaataggtatatttgtagaggtagaaattagattattggttgtttagtatagtgtgggtgtagaaatttaggtggggagatgatagttaatatataggattttttttttttttagataaaattgattgttatgttggatgtataagtttgtgaatttattaggaaatatttaattttaaataattatttatgaattatatggtatgtgaattatattttaataaagttttataaaatattttttgaattaagatatttaaaaattttatttgtattgtataattattttattttttattttgtgttaaggggtttgtaggatttttttatttgttattgtttttgatattattataaaatatattatataaaatacgatatttgtaaggttattaaatttaggtggatgatattaaatataaatataaaagaaatattaaatatttttgagtaaatatgaagtaatcgaattttgtttttttgttatttatgtatttaggatgtttatataatgtatttattttgaattgaaggagttatgttttaatttgattgatttttttttgtatataagtatgagaaagaaatagtgattggaaaagaattattatattgtataaggatggttttgaaatggattatagttttgttgatataatttagtttttattttagttttgggagttgtggaaaggtgttggtatgggtcgtagaatatagtttttggatgaatatgaagataattttgaaagaatttgtttagagaggttatgaggtgattgtattggtatttttagtttttattttttttgattttaacgatttatttatttttaaatttgaagtttattttatatttttaattaaaattgaatttgagaatattattatgtaattggttaagagattgttagaaatttaaaaagatatattttggttattttttttataagaataagaaattttgtgggtaattaatgatataattagaaatttttgtaaagatgtagttttaaataagaaatttatgaaaaaattataagagttaagatttgatatcgtttttgtagatgtttatttattttgtggtgagttgttggttgagttatttaatatattttttgtgtatagttatagttttagttttggttatttatttgaaaggtatagtggaggatttatttttttttttttttacgtatttgttgttatgttaaaattaagtgattaaatgatttttatggagagggtaaaaaatatgttttatgtgttttattttgatttttggttttaaatatttaatatgaagaagtgggattagttttatagtgaagttttaggtaagattttttttagttagtaatatgaagttttaatttatttgtgtttttgaagtataatttgtataaagttataaagttagggaagtggagtttttgataaatgaatttatgaaatgaaaatataagatgatttattaattttataaatattatagaaaagtttaaattatggggttagtgaaaacgttgtgattattatttatatagaatattttaggaaattataaatttatatattagtatatttaagattttaagtaattatatatttgttttattatagaatgttttagattttaaaaatagtaagattcgttaagtaatatttaatcgaatgtatagatttagaatgagtaattatatatttttttataattatttatataattgtagaaagttttttttttaaattttagttgttttatttagaaattaaaagatgtttttatgttattaggaggttgtttttatagtagagagagataatgtttatattttagatgtaaaaattaataagggtaatttgaagttttaaatgtttttatatttttttattaaataattggaaattttttatttaaagtttaattattttgttgaagtgtgaaggttgttatatttatatagtttatttgaaattatgtttttttatttaaaaatacgagattgattatggtcgagtatagatttttattttaataattttttaaaaatttttagttataatttataaatatttttatttaatattattaagattttagtttggatttaaatgagtagttggtataatgattttagttatatttataaaatagtttatagttaatttgaagaattaaagataaaaggattagtttaatgagttgtgtaaattagattatttgttagaaaattgtttttatggttattgtagaattaattgattatggagtttaaagatttgtttaaatatttagaggttattattgaagttttaaagagaaaataaattgatgtttaattttttatgatttattttaataattgtgagtatattgatatgatattagagatgtagtttaattttataatttttttattattttgttttttttataaataaataagggtaaaatatagaatatataaaaaataaattatttttatatatgaatatatgtatatattttttaaagtatataaattttattaatatttttgtttgtattattttaattttttttagaaaattatataaagtaattattttatgttatttatttttttttttttttatttttattagg

SEQ ID NO: 142 - DNA, 7025 bp, Artificial Sequence
  chemically treated genomic DNA (Homo sapiens)
  unsure (6828)
tttgataggaataaagaaaagaagaagtggatgatataagataattattttatgtaattttttgaaaggggttagaataatgtaggtaaaaatgttggtaaagtttgtgtgttttgaaaaatatgtatatatatttatatataggaataatttattttttatgtattttatattttgtttttgtttatttataagaaaggtaaagtagtgggagaattatgaggttaagttatatttttaatgttatgttagtatatttataattattaaaataagttatagagaattaaatattaatttattttttttttaaagttttaatagtagtttttagatatttaaataaatttttgagttttataattaattaattttatagtaattatagaaataattttttaataaatagtttagtttatataatttattaagttaatttttttatttttggttttttaagttaattgtggattattttgtgagtatggttgaaattattgtattaattatttatttggatttaagttaagattttaataatattaagtaaaaatatttgtaaattatagttagaaatttttgagaaattattgaaatagagatttgtattcgattataattagtttcgtatttttaaataaagagatatagttttaaataaattatatagatataataatttttatattttaataagatgattggattttaaataaaagatttttaattatttagtgaaggagtatagaaatatttgaaattttaaattatttttattgatttttgtatttgagatatagatattatttttttttattgtgaagataattttttggtaatatgggaatattttttaatttttaaataagataattgagatttagaaggaaaattttttgtagttatatagatagttgtagaaaaatgtgtaattatttattttaaatttatgtattcggttagatgttatttgacggattttgttgtttttaagatttgaaatattttatagtaaaatagatatataattgtttaaagttttaggtgtattaatatataggtttatgattttttggggtgttttgtatgagtgatggttatagcgtttttattgattttataatttaagtttttttataatatttgtgagattggtagattattttgtatttttattttataaatttatttattaaaaattttatttttttgattttatggttttatgtaagttgtgttttaaagatataaataagttagagttttatgttattaattgaaaaaaattttatttaaaattttattgtaaaattgattttatttttttatattaaatatttggaattaaaagttaaaataaagtatatagagtatattttttattttttttatgaaagttatttgattatttaattttgatataataataggtacgtaggaaggagggaaaataaattttttattgtgttttttaaatgagtagttaggattgaagttgtgattgtatataaagggtatgttaaatagtttagttagtagtttattatagggtaaataagtatttgtaaaaacgatgttaaattttgatttttgtagtttttttataagttttttatttgaaattatatttttatagaagtttttaattatgttattaattgtttataggattttttgtttttgtgaaaaaggtaattaaaatgtatttttttgaatttttgataattttttaattaattgtatgatgatatttttaaatttagttttagttaaagatgtaggataaattttaagtttaagagtggatgagtcgttgggattaaaaagaatggaagttgaagatgttagtatagttattttatgatttttttgaataagtttttttaggattgtttttatatttatttaaaggttgtattttgcggtttatattagtatttttttataatttttagagttaaagtaaaaattgagttgtattagtagaattgtagtttattttagagttatttttgtgtaatgtgataatttttttttagttattgttttttttttatatttatatatagagaaaaattaattaagttaaaatataatttttttaatttaaagtaaatatattatatgagtattttgagtatatggatggtaaggagataaagttcgattattttatatttatttaaggatgtttgatgttttttttatgtttatatttggtgttatttatttaagtttaatgattttgtaaatatcgtgttttatataatgtattttataatagtgttaagaatagtggtaagtgagagagttttgtaggttttttgatatagaatgagagatgaagtaattatataatgtaaatagaatttttgaatattttggtttaaggaatattttgtaaaattttgttgaagtataatttatatattatatgatttatgaatgattatttaaaattaaatattttttagtaaatttatagatttgtgtatttaatatagtaattagttttatttaaaaaaaaaaaaaattttgtatattaattgttatttttttatttgaatttttgtatttatattgtattgggtaattagtaatttaatttttgtttttataaatatgtttatttaggatttttttaaaaataaatgaaattatataatatgtggttttttgtggttggttatttttatttagtttaatgtttttaaaggattatttatagaatagtgtatataaggattttatttttattgttttttattagatgttatttataagtagaaattatttatttattttttagtggatagatattgatttttttttatttttggttattataaatagcgtttatatttttattgttaaatagtattagatgttatttataaatataatttatttatttatttattagtgtacggatattgttttttttttatttttggttattatgaatagcgttgattaatattgatgtatatgttttttgtagatatgtttttattttttttgggtatatgtttagaaaggtaattattgaattatgtggtaaatatatgtgtaaatttttgaggaattgttagatttttttatagtgggtgaataattttttatttttattaataatgtatgagagttttagtgtttttattaatttgttaaattttattttttaaataataaaaaaggttattttttattttaatttattaatatattttaatagatataaagaaaggaaagtttttttttatatattggagggaaaagggaataaattaattattaatttatttaatattttattgtaaaattgattatatttttttttgttaaaattattaaatgtaaagttaaaatgaagaaaatgtaaaagattttttatttttttgtaaatgtattttggtattaagttttgatatgataatagttatattagaaggaggtaatgaaagttttttatagagtttttggtatatattgttagttgtaaatggatgatagtagattaaatgtataataaatgtttaatagattaagttgtttagatagtagtttattaatgagaaatgatatttgtaagaatgatataaattttggaattttgttgttttttataagttttttgtttaaaatagtatatttatagagtttttgaatagtattagaatatttataatatgtgttttttgtatttttgaattatatgttaaaatgtattttttggaaatttgtatgtttatattttgattaattttataaaaatgaaattaagtttatttttagtaaaagatgtgggataaattttaaatttaatagtaaattgttggaattaatgaggatggaagttgaaggtgataagtatagttattttttggtgtttttgagtaagtttattaagtattattattaaattgatataaagattgtattttattggttatattagtatatttttataggatttagagttagaatataattgttagtataagaaataaaaaagtttattttttagataatttgttaaaatgttatttttttttttaattttttttaatttggtatatattaatgttaattaatgttataatgatttaagtgttgataatagagtttttggaaagtaagagaataaagaaaaggatgaatgattttgtgtttgtatgtgtgaataataaatttattgttatttgtttattgtaaatgtggttgtttttagaataagagataatttaattgtatataaagagtttttagtataagaaagtattattttgttaataatgaggtagtggtgtgatttatttttatttatttaaatatttttaaatagaatatttttattttttttatgtagttttatatttattatattagttttattttatgttttttgatattgtttttttgattgtagaaattttttttatttttatttaaatagatatgttttaagtataattatagttattttgttttatttgaaaatattttgtttaaattataataatttttttttttgaatatttgtaatattgtttatattttttagttttagaaaatatttattttttaaatgtttattatttaatttgttttatagattgttttgtaatttaggtaagttgtatttttaaaaagtttaaatagaaatttatattaagtagaattaggaaggaaaagatgtatgttataaaatagagatatttgtttttattttattaataatttgttaatttgaaatgaggtaaattttttttaaaaagatatttgaatatagtttttgagtaaatattgtttgtagagtggtaatattgtttaatatttttaatgtttttgagtgtaggtattatgtgttatttagattttttttttgggaatatagaaattattttttagttgatgaagtgatgaataattgatatattttatttataagtttttttttttagtatatttttgttgaaagttatttagtatgtagtgatttttttaagatagttaatatttaatgtttggttatatgtaggattttaaaggtttattttttttattttaatttggattaattttgaagggttaatttagttttagaatttttagtgggtgagatgaaatttatgttgagattgtatgttttagtatgtttagggtgttatatagaaaaatattatatattggttagtttatagataataaatatttatttgttatagtttttgaggttgaaagatttattattaagatgttggtattgggtatttttttaagatggtaattcgttattatgttttaatggggaaaatagatgaatgagttattgtgagtatattttttaaaagaattaattttattaaataggattttgtttttatgatataaatattttttaaaaggttttgtttgttaatataattattttggttataagaattttaatatattaattttgggggtatttagatatttaaattattgtattgaattatgtattattttgttttattgtttaattttgttttttatttttttatagatgttatttttaagaaatttttttaattatttttattaaaaaatatttagtttagagtttattttttggaagtatttaatatttgataatatgtattaagagaggttagaaaaaaaagaatagataataaaatgagattttagagttggattatatattattagttgtaatgagaattttattattattggtatagagaatataaatagtttttggaatgtgataatttaaattttttatatttttagtaatggtaaattatgttggtagtattttgaaagggaaagttttatttattaggatatattataaatttattaatatgggaaaagtagaaattatgattataatagaggtaaatgtttttttttgtagaattaatgtttgggagaaaataatggaagagtgaggattaataattattaaattaaggtaaacggtgaaagttagaaaagtttttttggaagtgttattagaaaaaggggtttagatttagatattaagagaaggttattggattttatatagtaaggaatttaaggttagttatagagtgtaatgagaagataatttattgaaagttatgatattatagagtagggtatttttagaaggtaaggagttgaatgtaatatttttgttttaagttttttttatgtaggagttttatttttgtaaaggttaattaagttgtgtttagttgtgggtggttagataataggataaaattgattattttatttatgttaagaaaattatttttgatatttttttgtgtgaatatattaaaatataattgttattattttgaaattatgtatcgttttgggtattgggatatttggattttttattgtaggtgtgtgtgtttatagggagttgaatttaaaattatattattttgtttttttttagtttttgtttttttaattgtagtatatatagagatttttattttatgtagaagtattcggtttttattattaaatgaatttgaattttaagtttaggattgaattttaaaaataagtttagtttagttttagttgaatttttagtttagtttgattattaattatatttagggttttagtttagatagagtgaaattataagatatttgagaaataatttattgtagttaaaatttttagtttttagatttttttgaatttcgaatttgtaaaagaggtttatttttttttgttaagggatagtatttttttattgtttgaagatgatatagtgtttttttttttgtaggatattttatatttttntttgtgatttgtatttggaatgattttaattattgtaaatgtatttagttttgttttataataaaggttgttgttgattttagattatgttttatgtaaaaatgagtggaatgtaaattttatggttgtggggtggagtgttttgtagagtgttaggtttaattggttaagcgttaagtttaagtttagagtttttt

SEQ ID NO: 143 - DNA, 13784 bp, Artificial Sequence
  chemically treated genomic DNA (Homo sapiens)
ataattgttttaaggaagtttagttaattttaagaaaatataaagaaatttaaagaaattaggaaatataatgtataattaaaatgggaaatttaatagtgatattgaaattatttaaaaagatagaaattatagagttgaaaaatataatgaatgaaataaaaatgtaatagatagtattaaaagtaatattgattaagtagaagaaagaatttgtgaattagaagataggttatttgaaaatatatagttaaaggagaaaaaaaatgataaaaaggaattttaaaaaagtttatgggttttatgggataattttaaaagtataaattttgagttataaaagtttaagatggagaagagagagataatggaggtataaagtttatttaaagaaataatagtagaaaattttataaatatggggaaagatataaatatataggtaaagagggttaaatgtttttaataaggtttaattaaataaaattatattaagatatattataatttaattattaaaaattaaagagaggattttgaaagtagtaagaaaaaagaagtaaataatatattagagagttttaatgaaattagtaatagatttattagtagagatttataggttagggatagtgggatgatatatttaggatgttgaagaaaaaattttgttaattaaaattattgtattttaaaagttgaaatgaaggagaaatgaaggagcgatgaagaaggagagataaagatttttttagataaaaattggaaagaatgtttatatcgttaagtttgttttataagaaatgttaaaggaagttttttaagttgaaagaaaagaatattaattagtaatataaaaatatatgaaagtgtaaaatttagtggtaaaagtaaatatatagttaaatttagaatattttaattttgtaatggtggtgtgtaaattgtttatatatttagtatgaaggttaagagaaaaaattattaaaaataatgattataataatttgttaagagatatataatataaaaagatgtaaattgtagttttaaaaataaaatgtgagggagaatggagtaaaagtttagggttttttatgtaatgaaagttaggttgttattagttttaaatagtttgttataattgtaagaggttttatgtaagtttcgtggtaattataagggaaaaatttatagtagatatatataagataaaaagtaagtaattatagtataatattagagaaaattatttaattataaagtaagaaaataaaataggttaaaagtaataaaagatttataaaataattagaaaataataaaatggtagtagtaagtttttatttattaataattattttaaaagtaaatagattaaattttttaattaaaggatatagagtggttgaatggaaaaataaataaataaaataagatttaattataagttgtatataagagatttattttatatttaggatatatatagattgtaagcgaagggatgggaaaaaatatttatgaaaatgaaaattaaaaaagagtaggttggttatatatatattagataaaataaattttaagttaaaaattgtataatgaggtaaaaaattattatatagtgaaaaggggtttaattttttaagagaatatgataattgtaaatatatatgtatttaatattgagatatttaaatataggtttaattttagtattttgggaggttaaggtgggtagattatttgaggttaggagtttatgattaatttggttaatatggtgaaatttcgtttttattaaaaatataaaaattatttggggttaaatgggagtgttttaatggtgggtttgtgagtaaagattgtgaatttgtttaagataaatgagaaaaagagagtatttttttttaggaaaaattttattagtttttttatgtttttgttataaatagatagaggttttatttaattggtttagagaattttggaattaaatatgagggtggtatatgtttgtaattttagttattcggggggttgaggtaggagaattatttgaattagggagttggaggttgtagtgagttgagattacgttattatattttagtttgggcgatagagttaggtttgttaaataatatagaattttagttagatagaaggaataaatttaagagatttgttgtgtaatatggttattgtaatttaataacgatgtatattttgaaaatttttacgataatttaagtgtatttattagaagaaatgataaatatgtgaggtaatatgtatgttatttagtttaatggagttatttaataatgtatatatatttaaaaatattatattatatatgataaatgtgtatgattttaatgttaattaaagaaataaagttatagagaaagaaaatggtggtaaatattttgttaaataataagtaattatattaatttaagtttttgttaaatgttagtatttggggttttaattagttattatagagttgaaaattttgtatgataatataaatttttattgaaaatttattttatttttattttttaatgttttatagtaatagagaggaattttatttttagttaagagaggggttgaagatttgttgagtggggagaagtatattaatattagttttttttgtggataatagatttaatttatgttttattttatttagttaagagttggtttttattaagtaattatggttattttcgttttgtaaatgagaatattgatgttaagagagagatttttgttaaaggcggtatatagaagtggtggagttaatatttaagttagtttatggaattttaaagtttgagttttttttttagttcgtttttttagttttttttggagtattggttggggaatgtttaggaggaaggggagggtttgttaaattgggtagattagtgtatggaggaaaagttttttaattaaagaggtgtgagggtttggaagaattgattaattataaaatatgttttaggtttagtttttttttttttttagtttttttttttttttttttagggtagaatttttttagtttggttttattgatatttattgttgtttattttattggggtgggattgttttgtggtttgtaggatgtttagtggtattattggtttttatttattaaatgttagtagtatttttttttagttgtgataataaaatatatttttagatattgttaagtggtttttggggtagggaattttttagatttaataatcggttttggtttcggttttgtttttgagatggagttttattttgtcgtttaggttggagtgtagtggtatgattttagtttattgtaattttcgttttttaggtttaagtgatttttttgttttagtttttagagtagttgggattataggtggtttattgtttttagataatttttgtatttttagtagagatgaggttttattatgttggttaggttggttatgaatttttgattttaggtgatttatttattttggttttcgaaagtgttgggattataggtgtgagtttttatgtttagttaataattagttttatagtgattaattattttagtttgttttggattgaaggatttattaggatttttgaggtatttgttagggatttaaggttaaaattaggatagtttagggtaaattgggatatttggttaattaataagtaaagttttattttttggttaaattaaggttgtggtgagagggggtattgtgttgattgtgtggttgttttgttagtttttagtttttttaagttgttgttatattaagtatatttgtttaatatttttttttttttttttaggtagtttgttagggttgtaggggaggtgttttatttaaggaaggttggttgagttattgtatgggttattataggatagaagaagattagagtgaatgttggtttttgtgtgtttttttttttttttttttttttttttttgcgtgtgtgtgtgtgttgaattaaagaattggtaggggtagttgggagggtgttggattgtagagagttttttagtgttgttttagtggacgtgtatatttgtgtttttattgagagttaatggatattggatggggaaaggtttttagttatgtgttattgtagtttatgattatgtggtatgagtattttaatttatttggtgttttgaaatatttttatgagttattttgataatttgttaaggatatttttttgagagaaataaataaaagataaattttaaaaatagtttgttattaggattttatttgttgagatgttgaagatgtttttttaatagtgatatatgttttggttttttgtaaatttataaggtatttttaaaatgttatttgttttttatttttttatttttgatattattttatgattttgtataggatgaaagtaattgagttttgaaggtagtaagtaatatgttgaggttaaatgttaggatttgagttaggtttatggggttttatgttttgtgatttttttgttttattaggttgtgaaagaatgatttttgtatttatgtagttagtttgtgttgttgtaaatttgaatggtaaaatgataaatgtagatatagagggtgtgaattagttttattagtagtgattttgagaatagtttttttttttttttgttttttttttttttgttttgtagtaagtgggaggacgaagtaggttttataagagtagcgtttaagatttatagtcgtttagtgttaagttaataattttattgatatttggatgtagttttttgtgttttttgatataggtgtggagattgtaatttgttgtgtgtgattgtttgtatttttttgattatgtaaattagtggtttttgttaagaattttttatgttttgaagttttgagttggtttttttttattggtggattttattttattttattgggaggcgtaatttttaggttatagagtagtgataattatttgttagtgttttttaggagtgaggtatttggagttcggggattttaatttgtgataatgatagtagataaattggttttttttgtgaatggtagaaaggtaagtaggagttgatttttggttttgtgttttttttttttgggaggggaaatgtgttttttggtagagttatattttgttttttgttttttttgtttttttttatttgttttgtttttttttttttcgttttaaaggtgtcgttgtattttggtaatattagggaagaagattttttcggggttagagtatagataagatatttagaggttaaagaatgagggagagagaggtaagtagagaggtatttgtgagttagttgttaattttttgtagtagtggagattggtatagaatgagaaaggggagttgagttttaggtgagatttgaggttattattatatttttatttttgtttttaattaaatatattttaaaatttacgttgttttttttatagagagaaggaataggaatgtgtttttttgtttttattaggatataagatgtacgtagtttttgattttaatatattatatatataggtttaatagttagttttgatttattgtgaggtgatatatattgatattttgtggtaaattataattttttttttataaagggtattttttgtattttttttattttttatttatatatagtgagttttatatgtaagttgtaaatttgttatttatttgaatttattttattggtatatagggatttagggaaggtgatatgggtattagtttttggataagagtgagaatttttgtaaattttaatgtggtgtagagagagagggggtaagtatattatatggttattagtttttatttgtttttttataatattgttgagatgtttatatttgtttaattttttatttaggaatgaaaaggatagtaaaagagttttatagttgtatattgtaatttattgtgtggattgtgcgtgatgaatgtgtttaaagtgttttttaaagaagggtaattttatttgtttttttatattggtatttttgtattgagttgagaaatttttgatgtaattttgagtgatttttggtataatttttaagaataataatgtgttttattggatttttaggttttaaatttttaggatgtgtttgggtgattgtaaaagaaattttatgaattgttttaacgttagtgttttaaagattgatggattttttttgagtggtgtttttgggaagtgttggggaatggggatagttatgtttttttgggtttagagttttttttttgagttgtattttttttagggttggtatttggtattaatttaagaagtagggtaaagtttttaagtgtaagattttgtatttagtattttaaataattttttttttttagtaattatattgtagaaatttaggaaattattgtgtaattggttttttaggagagttatttatataaagttatttttggaatttttattagtaatttttatattgggtaaatagttagatttaatgacgtttaaggttatgttttattttgaggttttattatttattaaattaaattattggttaatttgtaaaagtataagtttttgtttttttttagggatggtttgttgttatgtattaaatttagaaagaagaattttaaggtaaatttggtttggggaaaattatttttttttgtattttatttttattttaggagagtaattttaaatttttcgatggtattattatattaaattttattatttttagaagtttttattattgttagtttttgtgatgaatatttatgtttgtaatttataatgatgtagtatttttagaaattgtaagaaaggtagaggggtaatgtagaaagtaattatgtgaaagtaatgttgtaaaaataagattaagtaagggaatttttgggtaaataatggtagttgtgagaaagttgtttttatttttatttagaagatattttagattttttgttataggaattgtgtaaagtagttattaaagaagttgtaagaatttagtgattttttttttttattattatattttaagttttagggtatatgtggataacgtgtaggtttgttatatatgtatatatgtgttatgttggtttgttgtatttattaattcgttatttatattaggtatattttttaatgttattttttttttttttttttattttacgataggtttcggtgtgtgatgtttttttttttgtgtttaagtgtttttattgtttaatttttatttatgagtgagaatatgtagtgtttggtttttaaatgtgagtttatttttttttttgttttgtattattgtttaggattttggttttattaaatggggttttgtagaaggtgttcgatgtaagaagtcgaatatttttagggttttttgtggtggtgatgagttttgatgattattgtttttatttatatttttttttgttttagagttagagttaaagggaaagagttgtttagtattttatttttattgtaatgatagtttttttgtaaggtagtattttagtttttttgagtagttattttgtttagttgagattgtggtatttggaagaatttgggaggatttggtaggttgggtgtagttaaaggtgtttaggagtgatttttataagaagtgagtgttagttatagagatcgttacggtgatttttatttatttatttatttatttatttatttatttattatttatttgtttattttttatatagttaatatttattaagttttttttgaggttttagataataggatatgtattgggggaataagatttttaagattaggtatttgttattttggagtttatatattagttagagagatggattataattagataaagtaatattttttgaaatgtattttatagaaaattagtagtatgagatgttttttttggatatttttaaattatttagtatagtgtatggtatatagtaggtgtttaattagtgtggatggaataagtggatgaatttttaaaattttgagaaattttgtagtaaataaattatttttttaattttgtattttataattattttatatttaaagaaaaattgtaagaagaatataaggaaatattaaatattttttatgtattttattaattgttaatgttttgttatatttgttttattatttttttttttttattttggatatatatatagatatatatgtatgtattataagtacgtaaataattttatatattaatgtatataattaatataaatgaatatatagtataagatagatttttgaattttttgatagtaagttttagatattatgtttttttagtttttattttaagaataaatatatttttttttttttttttttttttgagatagggttttattgtgtcgtttaggttggagtgtagtggcgcgatttcggtttattgtaattttgtcgtttgggtttaagtaattgtttgttttagttttttgagtagttgggattataggcgtttattatcgtgtttggttaagtttttgtatttttagtagagttggggttttattattttggttaggttgatgttgaatttttgatttgtgatttatttatttcggttttttaaagtgttggtattataggcgtgagttatcgcgtttggttagaataaatatatttttataaaattgtagtttatttatagaaattaagaaatttagttttggtgtaatattataaattttatgtaaatgtattttaatttttttaatattggtatttataattttttaattttagttcggaatttaagattacgttttgtagttggttgttatgtttttagttttttttaatttagaatagttttttagttttttttttatgatattggtgtttttgaaaagaataggttagtttttttttagaatgttttttatattgaattgtattatgtttttttgtaattagatttagagtttgtatttggggggtaggaatattatagaagtaatgtgttttttttattgtattttgttattatgtttgtttttttaacgttagtttttgggttttttttgtgatgcgaattttggtgatttggttaaggtgttatttattacgtttttttattgtaaggtaatttttttttatttttataattaatagaggttatgtgagaagataatttggaatgatataaatttttgtttattaaatttttatttattaatttgagtatttattgatattttttttttaaataatttttattgtggtaaaatatataaaatttattattttaattatttttatgtgtatagtttagtggtattatatatatttataatattgggtaattattattatcgtttatttttataattttttttattttttaagataaattttataaatttattaaataataattttttattttattttttttttagtttttggaaattattattttttttgtttttatgaatttgattaaattattttatttaaggggaattatatagtatgtttttttgtgattggtttattttatttagtataatgtttatttatgttgtagtatatgttaaaaattttttttttttttaggttgaataatattttattgtatggatgtattatattttgtttatttatttatttattgatggatattttggttgtttttatagtttggttattgtgaataacgttgttatgaatttaggtgtataaatatttgagattttgattttaattattttgggtataaatttagaagtggaattgttggattatatgttggttttatttttatttttttgtggaattgttttatttatttttttatagtggttgtattattttgtatttttattaatagtggataggtgttttagtttttttacgtttttgtaaatagttattttttgtttatttgtttgttcgttgattatagttattttaatgggtatgaggtgaaattttattatagttttgattagtgatgtttagtatttttttatttatttgttggttatttgtagatttttggagaaatgtttatttaagttttttgtttatttttgaattgggttttatagttgttgagttttaggagttttgtattatatttgattttatagttattgatggtttattgtaatatttatataaaaattagaagaaaagagaagaaggggagatggaaagatttttaatttttaatttttgggggtatatagtagatttatatatttatggggtatatgagatattttgatataggtatgtaatgtgtaataattatatgatagaaaatgtggtatttatttttttaagtatttattttttgtgttataaatgatttaattatatttttttagttatttttaaatgtatagttaaattattattgattgtagttattttgttgtgttatttaatattaggttttttttattttttttatttttttgtatttattagttatttttattttttttttattttttattattttttttagtttttgatattatttttttattttatttttatgagtttaattgttttgatttttagtttttataaattagtgagaatatgtgaagtttgtttttttgtatttgatttattttatttaacgtaatgatttttagttttatttatttatgttgttgtaaatgataggatttcgtttttttttatggttaaatagtattttagtgtgtatgtgtattatattttttttatttatttatttgtttacggacgtttaggttgtttttaaatgttggttgttgtgaataatgttgtaaaaaatataggagtgtaggtatttgttttatatattgatttttttttttttgtgtatatatttagtagtgggattgttggattatatggtagttttatttttaatttttgggggaaattttaaattgttttttatagtggttgtattaatttttattgatgatttttaattggattaattgtgttgattataagatggttaattatatttattagatgatatttttttgttaggaagagtttttttatattttttatttgtttgtttgttgattttatttggatttataggttttaattgtatttaatgtattatagtttattatggttgttattttttttgatgtttaagttttattagagtaatttgtttaatttaatatttttttaatttatttttttataaaatgttttttttttgggatatttattggtattttgttgagagtgtttaatggagtgtattatggtaattttgttgttatattttgagagtggtatagttattttttatagtaatttatttgtggttggagtgataaggaaagtttttatgaagaaattgtttgaagttttttgataagttaaaatgtaggtggaagaggaatggtatagttaaaggtataggaattagaagatataaaatgtatttttagtgtattaagatgattagtttggtagggaagtagaagggagaaaggttgaaaatgaagattgggaatatattgaaaagggttttgaaagatagtttaaggaatttggatgttattttgaatatgtgggtggttatgaaaagtattgagtagggaattgatgtgatgtgataaaagtagaattgtagtacgggagaaatgaataatgtggtggtaagttaagaggtttttaatgttgtttataagaaaggtgataaagattgttattttgtgtatttatgattatttttatgatttgtaattaggatattgaataagttggatttatggggtgtaattatataagaaaattaattttatttatttttttttaaattttatttaaaggataaattttggtagttttatgaattttttattatttttagttaataaaaaattttatggttatttttaagttgttaaatagttttaatttaggacggcggggtgaggatagtaagaaagtttttttttaattggtattattgtaagatggttttcggttttttgagttttttaggtgtttggagttgattttttattttttttgtgatggtttttaaggatttttaagggttattatagggaatatttgtatgtatgttttatgatatgagtgatgtattttttttaggttgttgttttttattagtttttagtttggggaagtttattttatatagtttttttttattgaatgttttattttgtattttgggaaatgatttaaagatttttaagttagttttttttattttatgaatggtttgtattatatttataggcgatatttttatattttttgttttattaagtttcgggagtgtatattaattttagtatagttatttttttaatttaagtttaatgaggagtttaaatttgttattgtcggtattaattttttgttaagtttatttttttttttatgttgtaaaggtggtatgttagatttttatgtagtataaagtaagtttttttattaagtttgaggtgggaggtaaatattttttttttttttttttaggaaggtgtgggtagtatagttttttttaacgaaaattttattatgaattttttttttttattattttaataatatatatttttttaagttttggtaatgtgtgaagagtattgaaatcggtttttgtagattttttttgataatttatagtgggaattgatatcgtattttttagattattttttttattttattgaatttagtgatggatttttggtttgagattttttttttatttttgatatgtattagtgttgattaatacgtattatatgttaatattttgttttgagtataggttaatagaatggttttttatagttatatgtaggatttgagattgtatatttaaagaggtaaagttcgagatttgtatgttatgtttttagatgtttttgaaatttataggtgtgatttagtagttgaaatgagatgataggttttatttgaaggggatttggttttggtcgagttagcgtggaaggtgtaatgtttgtatgttttgtggtgggttttaaggtgagtattgaggtataattttagaatttaaggatttgagtatatatattgtttggttgtagtttataggtttatttttatggagttgttataaaaatattttagtttttatgatttatttagtatattgtattaggttatttatgtattgttataaagaaatatttgaggttgggtaattataagaaaagagatttagttggtttatagttttgtaggttgtataagtatgatattagtatgtgtttggtttttggggaggtttttaggagtttttatttatggtagaaggtaaagtgggagtaggtatattatatggttagtaagagtaagagagagagagaagggggtgatgttatatatttttaaatatttcgtgataattaatttataattaaggggatggtattaagttatttatgagaaatttgtttttatgattatattgttttttattaggttttatttttaatattggggattataattaaatatgagatttagaggggtagagtgtaaattatattatattttttattaattttataaattattgagtgagatattgaaggaagaaattaattgtagaaagatgattaagtatatttatgatatattttttttttatttattttaatagg

SEQ ID NO: 144 - DNA, 13784 bp, Artificial Sequence
  chemically treated genomic DNA (Homo sapiens)
tttattaaaataaatgaaagaaaaatatattataggtatatttagttatttttttgtaattaatttttttttttagtgttttatttaataatttgtagagttagtaggaagtgtgatatagtttgtattttgtttttttaaattttatgtttaattgtaatttttagtgttgaaggtggggtttagtgggaagtaatatgattatgggggtagattttttatgaatggtttagtgttatttttttagttgtgaattagttgttacgagatatttaaaagtatgtggtattattttttttttttttttttttgtttttattggttatgtgatgtgtttgtttttattttgttttttgttatgagtaaaaatttttggaggtttttttagaagttaagtatatgttggtgttatgtttgtatagtttgtagaattgtgagttaattaaatttttttttttataattatttagttttaggtgtttttttatagtaatgtatgaatggtttaatataatgtgttaaatagattatgaaaattaaggtatttttatggtaattttataagaatgaatttataaattatagttagataatgtatatatttaaatttttaaattttaaaattgtattttaatgtttattttgggatttattatagaatatgtaggtattgtattttttacgttggttcgattaaggttaaattttttttaaataaaatttgttattttattttaattgttagattatatttgtgaattttaggggtatttgagagtatggtatgtagatttcggattttgtttttttgagtatataattttagattttgtatgtgattgtggaaggttattttgttggtttgtgtttagagtagagtgttggtatgtgatgcgtattagttaatattaatatatgttagaaatgaaagagaaattttaaattaaagatttattattaggtttaataaggtggaaaaagtggtttagaaagtgcgatgttagtttttattgtgaattgttaaaggaaatttataaaaatcgattttagtattttttatatattattaaagtttaaaagggtgtatattattgggataataaagagaaagaatttatgataaggttttcgttggagggaattatattatttatatttttttaaaggagaaggggaggaatatttgttttttattttaaatttagtgagggagtttgttttgtgttatataaaaatttaatatgttatttttgtagtataggggaagagataggtttaataagaaattaatatcgataatgataagtttaaattttttattaaatttaagttggagaggtggttgtgttggggttggtatatattttcggagtttggtagagtagaggatgtggaagtgtcgtttatggatgtaatgtaagttatttatgagataaaaagagttggtttggaggtttttaaattattttttaaaatataggatagagtatttaataaagagagattgtgtggagtggatttttttaaattggaggttgatggagaatagtagtttgagaaaagtgtattatttatattatgagatatgtatgtaaatattttttgtggtggtttttgaagatttttgaaagttattataagaagaatgaaaggttagttttaaatatttaaaaggtttagaaagtcggaagttattttataatagtattaattaaaggagagtttttttgttatttttatttcgtcgttttgaattgagattgtttggtaatttaaaaataattataagattttttattgattaagagtaataaaaagtttatgaaattgttagaatttgttttttgaataaagtttaaaggaaagtagatgaaattaatttttttatgtgattatattttatgagtttagtttatttaatattttggttataaattatagaagtaattataaatgtataaaatagtaatttttattattttttttgtagataatattaagagttttttagtttattattatattgtttatttttttcgtattgtagttttgtttttattatattatattagttttttgtttagtgttttttatgattatttatatatttaaggtaatatttaagttttttaggttgttttttaaggttttttttaatatatttttaatttttatttttagttttttttttttttatttttttgttaagttggttattttagtgtattaaaaatatattttatattttttaatttttgtgtttttgattatgttattttttttttatttgtattttgatttattagaagattttaaataatttttttataaaggttttttttattattttagttataagtggattgttatagagaatgattgtgttatttttaaggtgtgatagtaggattattatggtgtattttattgaatatttttaataggatattaatgggtattttaaaggaaaaatattttgtagggaagtgagttaaggaaatgttgggttaagtagattgttttggtaaaatttgagtattaaaagaaataatagttataatgggttataatatattaaatataattaaaatttatgagtttaaatagagttaataaataaataaatggaagatatggaaaagttttttttggtagaagaatgttatttaataaatatgattggttattttgtaattaatataattgatttagttaagaattattaatggaaattagtatagttattatggagaatagtttgaagttttttttaaaaattaagaatggagttattatatgatttagtaattttattgttgggtatatatataaaagaaaggaagttagtatataaaatagatatttgtatttttatgttttttgtagtattatttataatagttaatatttggaagtaatttaagcgttcgtgaatagatgaatggataaagaaaatgtggtatatatatatattggagtgttatttagttataaaaaagaacgagattttgttatttgtaataatatggatggatggagttggaggttattacgttaagtgaaataagttaggtatagaaagataaattttatatgtttttattgatttgtgggagttaaaaattaaaataattgaatttatggagatagagtagaaggatggtattagaggttggaaagggtagtagggggtaagaggaaagtagggatggttaataggtataaaaaaatagaaagaatgaaaaagatttagtgttggataatataatagaataattatagttaataataatttaattgtatatttaaaaataattaaaaaagtataattagattatttgtaatataaaggataaatgtttgaggagatgaatattatattttttattatgtaattattatatattgtatgtttatattaaagtattttatgtattttataaatatgtagatttattatgtatttttaaaaattaaaaattaaaggtttttttattttttttttttttttttttttttggtttttatgtaaatgttgtaatgagttattagtgattatgagattaagtgtaatatagaatttttaaaatttaataattataaaatttaatttaaaaatgggtaaaggatttgaatagatatttttttaaagatttataaatggttagtaaataaatgaaaagatgttgaatattattaattagaattataatgagattttattttatatttattaggatagttatgattaacgaataaataaataaatagaaaataattgtttgtaaggacgtggagaaattggaatatttgtttattgttgatgggaatgtaaaatgatatagttattgtggaaaaataagtaggatagttttataaaaaagtaaaaatagaattagtatatgatttagtaattttatttttggatttatatttaaaataattgaagttagggttttagatatttatatatttgagtttatgataacgttatttatagtagttaaattgtgaaagtaattaaaatgtttattaatagatgaatggataagtaaaatgtgatatatttatataatggaatattatttaatttgagaaaggaaggaatttttgatatatgttataatataggtgaatattatgttaaatgaaataagttagttataaaaagatatattgtatgattttttttaagtgaggtagtttagttaaatttatagagatagaaaaaatgatggtttttagggattgggagaaaggtagaatagggagttattatttagtaaatttatagagtttgttttaaaagatgaaagaagttatggaggtggacggtgatgatggttgtttaatattatgaatgtatgtaatattattgaattgtatatataaaaatgattaagatggtaaattttatgtattttattataataaaaattatttaaaaaaagaatattaatggatatttaaattagtgggtgaaaatttgatgaataagaatttgtattattttaaattatttttttatatagtttttattaattataaaggtaaagaaaagttattttatagtgaagaaacgtggtggataatattttagttaagttattaaagttcgtattataaaaaagatttaaaaattgacgttaaaaaaataaatataatgatagaatgtagtgagaaaaatatattatttttgtggtatttttgttttttaaatgtagattttgaatttaattataagaaagtataatataatttaatgtgaggaatattttaaaaaaaaattggtttgttttttttagaaatattaatgttatgaaaggaaagttgaggagttgttttagattagaggagattaaagatatggtaattaattgtaaggcgtaattttggatttcgggttggggttggggagttataaatgttagtattgggaaaattggaatatatttgtataaagtttatagtattatattaaagttaagttttttgatttttataaatggattatagttttgtaagaatatatttattttggttaggcgcggtggtttacgtttgtaatattagtattttgggaggtcgaggtgggtggattataggttaggagtttaatattagtttggttaagatggtagaattttaattttattaaaaatataaaaatttagttaggtacggtggtgggcgtttgtaattttagttatttaggaggttgaggtagataattgtttgaatttaggcggtaaggttgtagtgagtcgagatcgcgttattgtattttagtttgggcgatatagtgaaattttgttttaggaaaaaaaaaaaaaaaaagaatatatttatttttaggataagagttaaaggaatatgatgtttgaaatttattgttaaaaggtttagaaatttattttatattatatatttatttatattaattatgtatattaatatatagaattatttacgtatttataatatatatatgtgtatttgtgtgtgtgtttagagtgagaaagagagaataataaagtaaatgtggtaaaatattaatagttggtaaagtatataaagggtatttagtatttttttgtattttttttgtagtttttttttaaatataaaataattgtaaaatataaagttagagaagtaatttatttattataggattttttaaagttttaaaaatttatttatttattttatttatattagttggatatttattgtatattatgtattgtgttaagtggtttaagaatatttaagaagagtattttatgttgttagttttttgtgaaatatattttagaaggtattattttgtttaattataatttatttttttaattagtatatgggttttagaatggtaaatgtttgattttggagattttatttttttagtgtatattttgttgtttgaggttttagaaggagtttgataaatgttgattatatggggagtgagtaagtgaatgatgagtaagtgagtgagtgagtgagtgagtgagtgaaagttatcgtgacgatttttgtagttgatatttattttttgtggggattatttttggatatttttggttgtatttaatttgttagatttttttagatttttttaggtgttatagttttagttagatagagtgattatttagaaaagttagaatgttgttttgtaaaaaggttgttattataataaaaataaaatattggatagttttttttttttgattttgattttagaataaaagaagatgtgaatgaaaataatagttattaaggtttattattattatagaaggttttagaggtattcgattttttgtatcgaatattttttgtaggattttatttagtgaagttagagttttggatagtggtataaaataaggagaggagtaggtttatatttaaaaattaaatattgtatgtttttatttataggtaggaattgaataatgagaatatttggatataggaaggggaatattatatatcggggtttgtcgtggggtggggggagaggggagggatagtattaggagatatatttaatgtaaatgacgagttaatgggtgtagtaaattaatatggtatatgtgtatatatgtaataagtttgtacgttgtttatatgtattttagaatttaaagtataataataaaaaaaaagagttattaagtttttatagtttttttggtaattattttgtataatttttgtaataaaaggtttagaatattttttgaataaaaatgaggataatttttttatagttgttattgtttatttaggaatttttttgtttggttttgtttttatagtattgtttttatataattattttttgtattgtttttttattttttttgtagtttttgaagatgttatattattataaattataaatatggatatttattatagaaattggtagtagtagaagtttttagaaataataggatttgatgtgatggtattatcgaaaaatttaaaattatttttttaaagtgaaagtaaaatgtaagggaaaataattttttttaagttagatttattttgaaatttttttttttagatttagtgtataatagtaagttatttttgaagaagagtagaaatttatatttttataggttaattaatggtttggtttaataaataataaaattttagagtaagatatgattttggacgttattgaatttagttgtttatttaatgtaaaaattattaataaaaattttagagatggttttgtgtaagtagtttttttagaaagttaattgtataatggttttttagatttttataatgtaattgttgaaggaaagaagttgtttgaaatgttggatgtaaaattttatatttgaaagttttgttttattttttgggttggtattaggtgttaattttgaaaaggatgtagtttagagaggaaattttgaatttagaagaatatggttgtttttattttttagtattttttaaaggtattatttaaagagagtttattaatttttggagtattgacgttgaaatagtttatgaaattttttttatagttatttaaatatattttggaaatttaagatttaggagtttagtgaagtatattattgtttttgaaaattatattaaaagttatttaaaattatattaaaagttttttaatttaatgtaaaaatgttaatatagaaagataaataaaattgtttttttttgggggatattttgggtatatttattacgtatagtttatatagtaagttataatgtgtaattatgggatttttttattattttttttatttttaagtgggaagttgaataggtatgagtattttagtagtgttgtaggagggtaaatggaggttagtgattatgtaatatgtttgttttttttttttttgtattatattaaaatttgtaaagatttttatttttgtttaagggttggtatttatgttattttttttaagtttttgtgtattaataaggtaaatttaagtaggtaatagatttgtagtttatatgtagaatttattgtgtgtgggtggggagtggggggaatgtaggagatgttttttatgaaaaaaaaattgtggtttgttataaggtgttagtatatgttattttatagtgaattaggattggttgttaaatttatatatataatatattagaattaaaggttgcgtatattttatattttgataaaagtaggaaaatatatttttgttttttttttttgtaaagagagtaacgtaaattttaggatatatttgattaaagatagaaatagaagtgtggtgatgattttaaattttatttagaatttaattttttttttttattttgtgttaatttttattattgtagagagttggtagttagtttatagatgtttttttgtttgttttttttttttttattttttggtttttgagtattttgtttgtgttttagtttcgagaaggtttttttttttaatgttattaaaatgtagcgatatttttaaagcgagagagagaaagatagaataagtaagaggggataggaaagatagagaataagatatggttttgttagaggatatatttttttttttagggagaagggatataaaattaaaggttagtttttatttatttttttgttatttataaagaaaattaatttgtttgttgttattgttataggttggggttttcgaattttaggtattttatttttaagagatattggtaggtagttattattgttttgtgatttgaaagttacgttttttaataaaatgaaataaggtttattaatgggagggaattagtttagagttttagggtatgaagagtttttggtaaaagttattggtttatataattaaggaagtgtaaataattatatatagtaaattataatttttatatttgtgttaaagagtataggaaattatatttagatattagtaaggttgttgatttggtattaggcgattgtgggttttgggcgttgtttttatgaaatttgtttcgtttttttatttgttgtaagatagagaaggggaagatagaggagggaaaggattatttttagagttattgttaatagagttgatttatattttttgtgtttatatttgttattttattatttaggtttatagtaatatagattgattgtatgaatgtaagagttatttttttatagtttggtggagtagagaggttataggatatggagttttatgaatttgatttaaattttggtatttgattttagtatgttatttattatttttagaatttagttgtttttattttgtataggattatagaatgatattaagaatagaagaatgagggataaatgatattttgggagtgttttgtaaatttgtaaagaattaaaatatgtattattgttgaaaagatatttttaatattttaataaataaaattttaatagtaaattatttttgagatttgttttttatttgttttttttaggaaaatatttttgataagttgttagagtaatttataaaagtattttaaaatattaaataaattaaaatgtttatattatatagttataggttatagtaatatatagttgaaaatttttttttatttaatatttattaatttttagtggaaatatagatgtgtacgtttattggagtagtattaaagggttttttgtagtttagtatttttttaattgtttttattagttttttagtttaatatatatatatacgtaaaaaaaaaaaaaaaaaaaaaaaaaaaaatatatagagattagtatttattttggtttttttttgttttgtaatgatttatatagtggtttagttagttttttttaagtaagatattttttttataattttagtaggttatttgagggggaagaaaggagtattaggtagatgtatttgatatagtaatagtttagagaaattgaagattgataggataattatataattaatataatgtttttttttattatagttttaatttaattaggagatgaaattttatttgttggttgattaaatattttagtttgttttggattattttagttttagttttgaatttttgataaatgttttagagattttagtaaattttttagtttagggtaaattgggatggttggttattataaaattggttgttggttgggtatggaggtttatatttataattttagtattttcggaggttaaggtgggtggattatttgaggttaggaatttatgattagtttggttaatatggtaaaattttatttttattaaaaatatagaaattatttgggagtagtgggttatttgtaattttagttattttggagattgaggtaggagaattatttgaatttaggaggcggaggttgtagtgagttgaaattatgttattgtattttagtttgggcgatagagtgagattttattttaaaaataaaatcgaaattaaaatcggttgttaaatttgagagattttttattttagaagttatttggtaatgtttggggatatattttattgttataattggggagggatgttattggtatttaatggatggaggttagtaatgttattaaatattttataaattataagatagttttattttaataaaatgaataataatgaatgttaatagagttaagttggagaaattttgttttgaaagaaagaaggaaggagttggggagagagagagattgagtttagggtatgttttgtaattagttaatttttttaaatttttatatttttttgattgagaggttttttttttatgtattaatttatttaatttaataagttttttttttttttttaggtattttttagttaatgttttaggaaaagttaaagggacgggttgaggaaagagtttaggttttggagttttataggttggtttgaatgttagttttattatttttgtgtgtcgtttttggtaaaaattttttttttggtattagtatttttatttataaaacggaggtggttataattgtttggtaaggattaatttttagttgaatgaaataaaatatagattaaatttgttgtttataggagaaattaatgttggtgtgtttttttttatttagtaaatttttaattttttttttaattagaggtgaaatttttttttattattatggagtattgaaagataaaagtgaaataaatttttaataagggtttgtgttgttatgtagaatttttagttttgtaataattagttgaaattttaaatattgatatttgataaaaatttgaattagtatgattatttattatttagtaaagtatttgttattattttttttttttgtgattttatttttttaattaatattaaaattatatatatttattatgtataatatgatgtttttaaatatgtatatattgttaaatagttttattgagttgaataatatatatgttattttatatatttattattttttttggtgaatatatttaaattgtcgtagagatttttaaaatatatatcgttattaagttatagtgattatgttgtataatagattttttgaatttattttttttatttgattgaaattttgtattatttgataagtttagttttatcgtttaggttagaatgtagtggcgtgattttagtttattgtaatttttaattttttggtttaagtaatttttttgttttagtttttcgagtagttgggattataggtatgtgttatttttatgtttggttttaaaattttttagattagttaaatggggtttttgtttgtttataataaaggtatggagaggttgatgaaattttttttaggaagaagtatttttttttttttatttgttttgaataagtttataatttttgtttatagatttattattgaagtatttttatttagttttaggtaatttttgtatttttagtagagacggggttttattatgttggttaggttggttatgaatttttgattttaggtgatttgtttattttggttttttaaagtgttgggattagatttatatttaggtgttttaatgttgggtgtatatatatttataattgttatatttttttgagaaattgagtttttttttattatataataattttttgttttattgtatagtttttgatttaaagtttattttatttgatatatgtatagttaatttgtttttttttggtttttatttttatggatatttttttttattttttcgtttgtagtttatgtgtgttttaaatgtgagatgagttttttgtatgtagtttatagttgggttttgttttatttatttatttttttatttagttattttatgttttttgattaaaaaatttaatttatttatttttaaggtaattattaataggtaaggatttattattgttattttattgttttttggttgttttatagattttttgttgtttttggtttattttgtttttttattttgtgattaagtgattttttttagtgttatgttgtgattgtttattttttattttatgtgtatttattgtaggttttttttttatggttattacgaagtttatataaaattttttatagttataataggttatttaaagttgataataatttaatttttattgtataaaaaattttaaatttttgttttatttttttttatattttgtttttgaagttgtaatttatatttttttatattgtgtattttttaataaattattgtagttattatttttaatagtttttttttttaatttttatattaaatatataagtaatttatatattattattatagaattagagtgttttgaatttgattgtgtatttatttttattattgagttttatatttttatatgtttttgtattattaattagtgttttttttttttagtttgaagaattttttttagtattttttgtaagataagtttagcgatgtaaatattttttttagtttttgtttgggaaagtttttatttttttttttttatcgtttttttattttttttttattttagtttttgaggtataataattttggttggtagagttttttttttagtattttgaatatattattttattatttttggtttgtaagtttttgttgataaatttattgttaattttattggaattttttgatatgttatttgtttttttttttttgttatttttaggattttttttttggtttttaatggttggattataatgtgttttggtatagttttgtttaattgaattttattggagatatttgattttttttatttgtgtatttatatttttttttatatttgtaaagttttttgttattatttttttaaataagttttatatttttattgttttttttttttttattttgagtttttatgatttaaaatttgtatttttgaggttgttttataagatttataagtttttttaaaatttttttttattatttttttttttttttggttgtatgtttttaaataatttgttttttagtttatagatttttttttttgtttaattagtattgtttttgatgttatttattgtatttttattttatttattgtattttttagttttataatttttgtttttttaaataattttaatattattgttaaattttttattttggttgtgtattgtgttttttgatttttttgaatttttttatatttttttgaagttggttgaatttttttaaaataattat

SEQ ID NO: 145 - DNA, 15247 bp, Artificial Sequence
  chemically treated genomic DNA (Homo sapiens)
taatttaagtatgtgaattttagtagttaaatatgattggttgatttaggttttgtaggagtttagaggtaaggagggaatgtgggtgagtcgtaggagtttaagttagttaaagttaagtttagaggttagtggatttgtataaatttgaaaaaggtttaatatttgttgtaaatatttgtttgttattgagttttatttaagttatttttatattattatgaatgaagttagatttttagggaaaagtggttaataatttggatttttgcggtagtagggtggattatataatgtttatttttgatattacgtttgatatttatttagttttttagttttatttaaagtttttatgatttagtaggtttaggttaggcgatttttttaggtaattttaataatagttggttttttttttttttagtatttttttttcgtgttattgtttgattatttgtttatgtttacgttttttgttgttgtatttttagagtttaataggtagggggtttaggatatagtagatatttagtatattggatgatttttatgggttagtggttatggttgaatataatatgagaggtttttttttttagaagaatgtgatgaaatatgtaattgatgaatatttagaatttagatatttatttgttttgaaaattgtatttttaatttatatttttagtgtttgtgatagtataaattagttcgagtattgtagaaaataattaataatatgttataagaattttaaaaagtttaaatgatttgaattaaaaatgatttttgaaaataggttttaaggaaataaatataaatgtagaggaaggatgttattgtattgttatagaagaaaataatttaaatgtttttagtaaaggagtatgtaaataaaggaatagttttttgattgtaaattgtgtaggtataggagaaaaatattatattttggaaaaagatttaatgatttggaaaaagttttatttgataatgttaggtggaaaaagtaggatataagattatgtattttataggatttattgtaaaatttttttttatatatatatatatatttttttataaatatataagagagaaaatattggtaaaaatgttatttgtttatcgtaatttttgaatgattgtttgatattttattttgtattttttaagtttttattagtaagtataaaaaataagttaagggtcgggcgaggtggtttacgtttgtaattttagtattttgggaggtcgaggtgggtggattacgaggttaggagatcgagattattttggttaatacggtgaaatttcgtttttattaaaaatataaaaaaattagttgggtgtggtggcgggcgtttgtagttttagttattcgggaggttgaggtaggagaatggtatgaatttaagaggtagagtttgtagtgagtcgagattttgtcgttgtattttagtttgggtgatagagcgagatttcgttttaaaaaaaaaagaaaaaaaagtgaaggtaaaaataaatttttaattattatttttatgttttttttgttttttgttttgttttgtttttgagacggagttttgttttgttattcgggttggagtgtagtggtatgatttcggtttattgtaatttttgttatttgggtttaagcgatttttttgttttagttttacgtgtagttgggattataggtaagagttattacgtttagttaatttttgtatttttagtagagatagggttttgttatgttgattaggttggttttgaatttttgattttaagagatttatttgttttggttttttaaagtgttgggattataggtatgagttattaggtttggtttatgttttttttttttgtaaatattagattagtagcgtggtacgtaaggtcgaggcgggaaaaggtatatttatgtttttttttttagtatagtttatgttatggttattattagatattagaggatatttgggttgtttttttttaagtaggtaattatttatattaaagcgggaaagatatggtgtagttaaataggtagagtagaaggtatgtgttgttattgtatataatattattgttattttttaaagtaaattttatttttttttttggtttgtttaagtttgttttatagtgaataggagttatggagttgtggtgatgtttattttttttttttaaagttaatagttaatattgaattgtaattttttttgttttttgttgtgtttttttttttttttttttgtttaattttgaatttattttataaggttattgtgaagagaatgaaattgaaatatgtagaatattttcggtttttttgaggatgggtggaattagaatagagtaattattttttgtgttgttttgtatgtttgttatttaataatatatgatgtttattttttttattttttttttgtaatattgatgaaataaaatttgtttataaagatttttagttgagtatttaaatgttttttttgaatatttgttatatggtttattttgtaagtttggttttaaatttgttgatattaggattaataatagtatgttttgtgttagtatattttatttttattgagttttgaaaattgattttagagaatagtatttttaaaataatatttttatttatattaataaaaatatttatgaatttatatgattaaaatattaaaatttagaatttaatttgtttatttaattaattatttgtaattatttttaggtaattgtattggtttggttttaagtattttttaattagggttgattttaagaagtgtttttatttaagttgtaattatagtcgatagaatttttatttaatatgtgattttttttaatttttaatttttttgagatgaagttttattttgttatttaggttggagtgtagtggtataattttggtttattgtaattttcgttttttgggtttaagtgattttttcgttttagttatttgagtagttgagattataggcgtgtgttattacgtttagttaatttttgtatttttagtagaggtggggttttattatgttggttagattggtttcgaatttttggttataagtgattcgtttgtttcggttttttaaggtgttgggattataggcgtgagttttcgtatttagttttttatgtaatattataaatttattgttattatttgtaagtttgttttttattttaaaatataagatatgataagattagaaattagttttgtttttttatttttttttttagaaataattttttaggaatttaaatttatagtaataaaaataaaggaaaaaaaaatatgtttttttttatataatgaataaaggttaagaaatgattttaggttttttatttattttgttgatatttgtgttggttagttaagaagatgatttgttcgattattttaatatttatttatttaataaattgtggattttggagatgaatagttgaagttagaattttgattattttttaatagttgtgtaattttgggtaagttatttaatttttttatatttttgttttttaatttgtaaaatgaagataatattagtatttaatttatagggttgttgggagggttaattaagtaaatatataaaaagttgagaatagtttttggtatatagtaagtgtttaataaattatggatgggaggattttgatttatatggagtttatagttttggtagtatggatcgggtaggtagaaaaagatattaaattatatagttaatagtatttttataattgtttttaatataggaaaagtatagggtgttaaagattaatttgtggtttttttttttaatgaattgttaaagttttatttttatgtttaagatttttattatatttttgtaagattaagaataatatgtgaagtttttattattatatatttatttattatatgtagttgtattggaaaaaattaaaagttgataatttttaatttgaagatgatggtatatattatgtatatatattaaggtgtttaaagataaattttagtatttgaggaggtgtagaaattatttaaattttttgattataatgataaattagttagtaatttattaaatattgtattatatattattaagtattttattttttaatatagttttttaaagatataaagttttttaaaatttttgtttatttgggggtaaaatttggggaagtagatttttttagtgtttaaagaagttaatttggtagtgtattagagttgaatatattttttttattataagggaatatattttttttatttaagttaagttgtttttttttggtaaaggaggaaattaatatttatttgtacggagataaacgttttagagtgtttttatattaaataattagtatattagtttagtaagtgataatttacgaataagttaagaagagttaagaaagaaaaagaaaagtatttatttattttttggttgtaaataatatttatattagcgtatggtaaaatttaattttgtatagagtaatttaatttaggattgttgattttttaagagttgagaaagtatagttatggagcgtaaggttttatttagtagggtttaagtatttcgtttgtaaaattggtaggttattaacggtcgcgttttagggcggtttgaaggatgttgataatcgggagtttcgttttgggttcggttatttcgggtatttcgggtcggcggggcgaggttttttaattgttgggttagagcgggatttttttttttcgtatttttttgggtattttcggtttttaggtttttttcggagagttttgtttcgagtttattgggtttttaattttggtttgtttagcgtcgagtagttaattagaaggtagttttttcgagggggcgggacgagggggtggtgttgattggttgagtttgaagtcgttacggattcggggtaataggtagatttgtttgttgagggtggagatttacgagtcgaggttttttgtagtgttttgtatagtaaatcgtacgttatggttgatagtcgggatttcgttagcgattagatgtagtattggaaggagtagcgggtcgcgtaggtatattttgtgtttttcgagcgggttcgaaggttcgtttagaaagcgggggcgtcggtaagtaaaggttcggtttttttcggggcggcgtttggagggattgtatcgcggtttattgggtaggggggatttttttcggtgtagacggatttttatattcgtcgaagtaggggaggggggttcgggtagtggggcgcgggattgtaggttttgttgttcgcgataggttcgggtggttgttttagaattttgtatttttgttaattgggatagaggtcgtagtttgaggatagattgagggtttatggggaaagaggtagagagttgtagttgtaaggaagttagtgaggggagaagtggaattaggttttaatggtgttttttttgaaatattgtttatacgtttttatagttgtggggttttagtagggtagggattgtgttttataattttgaggtttttagtattagttatagtgattggtacgtattatgtatattattaaacgattaaataaaagaatttttatatttattgttttatttgtattttaaaatgttaagtttagtattttagagttggggggtgatattagggattgattaatgcgtttattttattttttgagtatttgtaggtgttaggtattgttcggggtaaggtgtataaattttagtgcggtaagaataatatttttgagaagttgagagtttagtttgggagacgagatatataaatagatgattatattttagcgtggtgagggttttaatagaggttatttgtagaatgtagagggagtgattaggtgggtcggataaagtaggtgatatttgaataggaatttttttaaatgagtaggattttaatttggtggtgggggaggtatttttggtttgtgtttacggttgtagagttttagagggtatttatgaggaggttggattagatgagattatatttggtttgagtttattgttggtagattggtttagggagtttaaaggttttgttttgttttttggttgttggttaatggtagatagaggattgtagttttgttttttttattttgtttagtgtttttgtttaaaatttaggttcgtgaattggggtattaatgttaagtgtttatggattgttttaatggttttttgtttgggaaaaggttgttatttttttttaagggtttggaaaatttttttttttggttttgttttttgttatatattattaggttggtttatgagtttttaaagtaaattagagagaggtagagttttagtaaaggatgtgttattatttattggtagagataaggttagaatttagttttttggatttaagattttttttttatttagtgggtgtaaattttggtttatattgaagtttttatgaatattcggtgaattgagaaaagtgtggataaagtagtgagatttttataaaataaaatattttttttttttttttttttttttttttttttttttttttgagacggagttttgttttgttgtttaggttggagtgtagtggtatgatttttatttattgtaaatttcgtttttcggatttaagtaatttttttgttttagtttttcgagtagttgggattataggtgtttattattatatttagttaatttttgtatttttagtagagatggggttttattatgttggttaggttggattggaatttttgattttaggagatttgttcgttttggttttttaaagtatcgagattataggtgtaatatttttatttttaaaggatttttttttattttgagattagttgtttttttttttgtttgggagaattatgaattgttgaagtttttgttgttgatttattttatatagttgtttatgtgagaaatggttgattttaaaatatatttatagttgggaggtttttaattgaaatatagttattttttttgtttatgatattttagggtattgtgtatatcgttttgattggtagttatattgatgttttattgttttttagttttagttgtttttagtaaaaatcgtttattttttttaggtatttttttttttatttagggttttttaaaaggaattatgtatatgttttatagtttatataatttttaaatattttttttaaatgaaaaattttaaatatttagaaaagttgaaaaaattttgtagtgtatatttatatatttgttatttagattttataaggaatattttgttttgtgttttttattacgttattttatttgtttgtttattttttaatttatttaagttgttttatgtattagtagtttgttttttttattgttgagtaagattttattatttgaatatattattatttggatattttgttgttggatatttgggttatttaattttttttttattgtaagtaaagttgttgtggttgggtatgaaggtttatgtttataattttattatttttggaggttgaggtgggaggatagtttgagtttaggagttgagattagtttaagtaatatggtgaaaatttatttttataataaataaaagaagtagttagatatggtgatatatgtttgtagttttagttattcgggaagttgagttgggaggattgtttgagtttggggtgtggaggttgtagtgagttatgattatatgattgtattttagtttgggtgatagagggagattttgttttaaaaattaaaaataaataaagttgttataaaaatttttatataagtttttttgtgtataggtggttttattttttttaggaaatatttaggagtagatttattgggttataaggtaagtgaatgtgttatgagaaattgttgagtttttttttaaagtggttgtattattttatattttattagtagtgtatgggagttttagttgttttatattttattaatttttggtgttgttagttttttatatttagttgttgggtgtgtagtggtattttattatggttttaatttgttttgttttgatgattaatgatgtaaagtatttttttatatgtttattgattattggtatatatttttttgaagtatatgtttaaattttttgtttttttaaaaattgaattgtttttaaattattaatttatagtttatattttaagtttaattatgtggaattatgtgtaggttaagtgttataataataaattttaatatgtattatggtataaatatattagaaatttatggtcgggtgtagtgatttatatttataatttagtattttgggaggttgaggtgggcggattatttgaggttaggagtttaaaattagtttgattaatatggagaaattttgtttttattaaaaatataaaattagttgggcgtggtggtatatgtttgtaattttagttgtttgggaggttgaggtaggataattatttgaattttggaggcggaggttgtagtaagtcgagattttgttattgtattttagtttgggtaataagagtgaaattttattttaaaaagaaaaaaaaagaaatgtattttttttttatatgaatggtttaaagtggtttgaggttgaaggaggtgggtgggtgttttgttttttatagttattgagggtattaggttgaaggaagtttttttttggttaaatatggtttttatgggcgttattgtttagtatagaaggtttaagagcgtggagaagggtatatgagtgtgggaaggtttagggtttagggttattgttatttatattttgttggttagaattttgttataggttatatttggggtagtttattttttgtttaggaagttgattttattatattatttaaagcgtatattttatatttggtgaaaatttgtttagttatttttttgtgatgcggtaatggatatgtaatataatttttttttaaagaatatgttatttttattttttgatattaagatattttgttagaaaattatgatagtaatagatggtattaaaaaaaaatttttttttgtttggtaaatgtttttatttaagtgggtagttttgtgttaatatgatgttttttattttttaattagttgtgatgttttattgatttaggagagttttatggtttgggattattataggcgaatattttgttgtttttttttttaagaattagagtgttttattttggaaatatagttaattatgtgaaagtaatttattgggcgtattttttgtggttagatttggtttgttgataggtgaattgggagttttgtaaattttaataagtgagtattgagttagatgtgtttatgagtatgatttcgatttatttaaaaatttttattttttttttttttttggtaggagggaggtggttgtgtaggtatttttagttattttgaagggaatttaaatgggaattttattgtttattgtttagaatgttatgggttttttttttgagatatttatttttaatttattttttttttttttttttaagtgtagtttgttgttagtgttttttttttgggggtaaatgggaaatgttaataagtagtttttgatttttttaaaatgggagaatttgaatattttaaattttatttttttatatagtttttttattatttgggagagaggttaagttttagattatttatttttgttagtgagttgtttatgtattatagtttgtgagggtttatatttttttagggtaattttggtaataattgtattgatgttatattgttaatatttgggatggagaaggggtgattgagtgatttaatttttggtttatatgtgtttttattttttttgaaatatatttaggtatggaatcgttaagttattatgtgtagtgggagagattatgggagatgggatagaaatttttaaggttttattttttttttttagtttttgtatggtgggtaggtttatgtaaatttatttttaaagtttgaggaagttgagaggttaaagaaagaggttgataaattaagttttttagaaagaaatgtttagtagggatttaggattagaaattatgtttgtgttttgcgtgttggcgagataagatggtggattttatattattattttttagatttagggtttaatattatagggaagggcgatttagaagggaggtatggtatgattgaagtatgataatgttaaggttgtttgattttagggtaggatttatagtaaataggggtttttttataaggaataatagataaattggaaattttaaaattggagttaattagaagttagtatggtggattagtatttaagacggaattgttttagtttttatagtagttaatatttagattatttttattatttttttatagattaagaaatttgaaggttaggatagtttttggttttttgtacgtgggtgtatacgttgtaggtatttgaatttttgttgaataaatggagaatgttaggtagttatttgttagaaaacgttaggtatattttttattatagaatgaaaagacgttattatgatttttttgggattgatgggtaatttgtattaattaattttttaattaaaagtggaagaatatgtttaggtttttgaaatttttgtgagtgaagggaattattaagtggaaagtgtaatatgttgataaaatattttattagatgaagttaattttattttttttaggaaaatttttttatttatgtattagttttggttaaaagaagtttataaaggtagtaaagttaaaatagaattttattttaagtttttatttttaataattgtgttagtttttagttaagttaatttttgtggtagtttttataataagtgtgtttaaaggtgtttgattagaatttataaattaaaatattttttttattttttggaggggcgatgtagggagagggatagattgttgttgtttttttttgtttgttagaaaggtttttggttatattatattggttcgtggtttagtttatttgtatgttgaatttatatatatttgttttatgtttgttagtatattgagtagtgtattagggattaggtatatagatgtaaaaggagtatatagtttagagaggaaaaatagtgataggttgggcgcggtggtttacgtttataattttagtattttgggaggttaagatgggcggattttttgaggttaggagtttgagattattagtttggttaatatgatggaattttgtttttattaaaaatataaaaattagttgggtgtggtggtggtcgtttgtaattttaattatttgggaggttgagacgggagaattgtttgaattcgggaggaggtggaggttatagtgagttgagattatgttattgtattttagtttgggtaatagagcgagattttattttaaaaaaaaaaaaaaaaaaaaaaaaaaagaaaaatagtgatataaataggtaattataatattttgttatatggggtataagaagatgtttttggttttgttttatgagtggtgtggggtagggtagagagagtagtttaggagaggtacgtatggatgttatgggagttagtagttaggaagatgtaaatatgttaataaggatttttttagagagaggttttaaaattatttagttatagagaagtttttttttttttaaaaatattttggttttaaagttatttattgagttaaaaataataattgtaagttggaggaaatttttttgtttgtttttacgtgttatatgtaataagtaaatttgtgttataatattgatatttttgtaaagttatttaagttttttgagtttgtagtatcgtttattaaatgggattaataatattgatttttggattattgataggtttaagtgagataatttgcgtggttcgttttttagttttatttttttattttatttagtaaatttttattgtattaattatttttattttaaatatatcgtattttgttttttattttttaatattaatattttattttttagtttagattagttttttttatttaatgttgcgttaaatattttttgaagttgggggatttttttttttttagtttttgttttttggttttttttttttgttgttgattgttgaagtttttttgttttattggttttgaaggtaaattgtatatatatgagtttgtggggaaagttgttatataaatgaggataattgatttaattgttagagtggggaaatggaagagattttgaagtttttatttgtaatttaaaaatttaggttttattttttaataggattgatgttaaggaggggatttttttattgggtaggagggaggattgttataattttagtatttttatttttaatagttagtgttattaggaaagattattttaagttttagtattttatttatttatttaattttgtatttgttgtttttgggtgtggtatttatttttgattatattattttgattcggtaattagaagggaatatgtgatgtgtttttatttttgttttaggggtagttttttttttacgttaagaatgttggtatgtaaataatatttttatttgtttagcgttttttttattgagttttttggtatttttttttatatttgtattttttatgggatgtttttttttttttttttttgagacggagtttcgttgttgttgtttaggttggagtgtaatggtacgattttagtttatcgtaattttcgtttgttgggtttaagcgatttttttgttttagtttttcgagtagttgggattatagttatttttttattgtatttggtattaattttgtatttttagtagagatagggtttttttatgttggttaggttggtttcgaatttttgattttaggtgatttatttgttgtagtttttcgaagtgttgggattataggtgtgagttatcgcgtttagtttggatgtttttttattttttaaaggtttttttaaatattttgtttgtaagttgaaaagagtatttaaagagtgaatagatttggtttgttttggttttttaattattttaattttgttattatttaatagttttaggttagtggtttttaattttagtttgaataggagttatttaaaaatagtttaggttttatttagggtatttttattagatatttttaggggggatggtttaggtattaggaggttttaaaaagttttttaggtgattttagtgtattgttaaggttgaaaattaaggttttaggtttaaattaaaggtgaaattgttttttttttggtttattttttattttagaaagtagaaattttttttttggtttattttttattttaaattaaaaataaatttatagagggtaatacgtattagtacgttatagagggttatacgtattagtaatatatgtatttttaaaagagtgatgtgattgggtggtaagtgttgattggatttttaaattgtgatagtttagaaggggttttgttagatgggtttagggatagagatggtagagtgagagagtgtggatggaggagtatgtatttgttatgattattagaaaaataaaattttaaatgttttgttttttttgttgcgaggttatgtttttatagttagtgaagtgatagtatatatgtgttgaatgtgtggtttgtattttatatttaatttttttaatttatgtgttaattttaggaggtatttattattttattttgtagatgaaaatggagatttataaataagtaatttattagtagttatatagttggtaattggtagaattggaagttggatttaggttttagtgttggtatttatagtttttttttgttgttatgttggtttttttttatttggatgaagatataattttagtggtaagggtatttattagtgtgtgagagggttttgtttattagttttgtaaattgtacggttttttttatttaatatttttttttaaatagtttatagattttttgtggttttgtaagtgtttattttttatcgtattgttttttagagaagaggtaggaatttattttaatgtataggatagatatgtatggggagtaaaattatagattttattttaggtgtgtggaaatattaaaaatagtgtttttttttgtgtgtgaagttggtttgttgagttttgttatagatagcgttgagttttttttttaggtggaggtggcgtagttttgcgttatttacgtgttttttttgatttttagtgattcggggaagatattgtagaggtagttgtttgtggttaaaagtattttttgattatggaattagatgaagttatgagtttttaggattatgtggggttagaagaatgtcgttttaattttagaggagggatagttgagtgttttttgatgtaattgaaattggagaattaggtggattaaaattaattatttattatagtaaaataatttattttattttagagatatttgttatttttaaaatattaatattataatttattttattagtaatagtttatttttagtgatagtgaaagttattgattttttttttttaattgaaaagagatgttgtaaatagttggtgtatattttttgagatgtattaaataaggtagcgtatttgaagatcgtggtagtaataaagcgtttgtaagttttgagtaaagtattgattagtatagtttttttggagatcgtttttttattgttggattggatattttattgttaagtttgtaggacgtttttgggtatttttttgattgggagttttgtagaatttagtggttttttttggagtaggtgttgagtatatttttaggttttaaaattatttttttgttttttagagtaagttttttagtagattagtgttgagatttgttaagggtttttggggtattattaaaagttttaggtaatggtttattttgttagattttagtattttggatataggaaattaaaaaagagggtagatggtataaatattgtaaagttatgtattcgtgatagtgtaaatgaaaggtttgattgtgttaatttttttgtattttttttttgtgtttttgtaga

SEQ ID NO: 146 - DNA, 15247 bp, Artificial Sequence
  chemically treated genomic DNA (Homo sapiens)
tttataggaatatagaaagaaagtgtaggagagttagtataattaaattttttatttatattgttacgggtatatagttttgtaatgtttatattatttgtttttttttttaattttttgtgtttaaagtattaaaatttgataggatgggttattgtttgaaatttttagtgatgttttagaaatttttgataaattttaatattaatttgttaagaaatttgttttgaagagtagaaagatgattttggagtttgaaaatgtgtttagtatttgttttagagaaagttattgggttttgtaaagtttttagttagagaggtgtttaaaagcgttttataagtttaatagtgaaatgtttaatttagtaatgagaagacggtttttagggaagttgtgttggttaatattttatttagaatttataaacgttttattattgttacgatttttaagtgcgttattttgtttagtgtattttaagaaatgtatattagttatttgtaatatttttttttaattaaaaaaaaaaagttaatggtttttattgttattaaaagtaaattgttattggtaaggtggattatagtattaatgttttaaagatagtaaatgtttttgaaatgggataggttattttattgtaataaataattaattttaatttatttgattttttaattttagttatattagaagatatttagttgttttttttttagggttagagcggtatttttttagttttatatgattttggaagtttatagttttatttagttttatggttagagaatatttttgattatagataattgtttttgtagtgtttttttcgggttattggaaattaggagagatacgtaagtgacgtaaagttacgttatttttatttgggagaggaatttaacgttgtttatgataaaatttaatagattaattttatatatagagaaaagtattatttttagtatttttatatatttagagtggagtttgtagttttattttttatgtatgtttgttttgtatattaaaataaatttttgttttttttttagaaggtaatacggtggggagtaggtatttataaaattataaaagatttgtgagttgtttgaaaaaagatattgaataaaggagatcgtgtaatttgtaaaattaataaataagatttttttatatattagtaaatgtttttgttattagagttatatttttatttaagtaggaagaggttaatatggtagtagggagaaattatgagtgttagtattagagtttgggtttaatttttagttttattaattattagttatgtagttgttggtaagttatttatttatgagtttttatttttatttgtaaaatagaataataagtattttttaaggttaatatatgaattaaaagagttaaatgtaaaatgtaagttatatatttaatatatatatgttgttattttattggttgtgagaatatgatttcgtagtagaaggagtaaagtatttgaagttttatttttttagtaattatgatagatgtatatttttttatttatatttttttattttattatttttgtttttaaatttatttagtaaagttttttttaaattgttatagtttaagggtttaattaatatttattatttagttatattatttttttgaagatatatatgttgttaatacgtgtgattttttgtgacgtgttaatacgtgttattttttgtaggtttatttttaatttaaagtagaaaatgaattagaaaaaaaatttttattttttaaagtagaaaatgaattagaaaaagagtaattttatttttagtttaaatttaaagttttggtttttaattttggtaatgtattaaaattatttgaggagttttttaaagttttttgatgtttgggttattttttttagagatgtttgatagaagtgttttgggtgaggtttgggttatttttaaatgatttttgtttaagttaggattgaaaattattaatttagaattattgggtgataataaagttaaaataattagagagttagagtaaattaaatttgtttattttttaaatgttttttttaatttataaataaggtatttaaggaagtttttaaaaaataaagggatatttaggttgggcgcggtggtttatatttgtaattttaatatttcgggaggttgtagtaggtggattatttgagattaggagttcgagattagtttgattaatatggagaaattttgtttttattaaaaatataaaattagtattaggtgtagtggaggggtgattgtagttttagttattcgggaggttgaggtaggagaatcgtttgaatttagtaggcggaggttgcggtgagttgagatcgtgttattgtattttagtttgggtaatagtagcgaaatttcgttttaaaaaaaaaaagggggggatattttataaaaggtataagtatgagaaaagatattaagaagtttagtaaaaggaacgttaaatagatgagagtgttatttatatgttagtatttttaacgtggggagggagttgtttttaaggtagagatgagagtatattatatgtttttttttggttatcgggttagggtgatatggttaagaataaatattatatttaaaggtagtaggtgtagagttggataaatgaataaagtattaaagtttgaggtggttttttttgatgatattgattattaagagtgggaatgttggaattatggtagtttttttttttgtttaatgaaggaattttttttttaatattaattttgttaagaaatgaaatttgagtttttaagttataaatggaggttttagaattttttttatttttttattttaatagttagattaattgtttttatttatataatagttttttttataagtttatgtatatataatttatttttaaagttagtggggtaggaaagttttaatagttagtaatagaaaagggaagttagggagtaaaaattagaaaggaaaagattttttaattttaggggatgtttagcgtaatattggataagaggaattgatttaaattgaaagatagagtattaatattagaaggtgaggagtaggatgcggtgtatttaagatgaaaataattaatgtaatgaagatttattagatgaaatgagagggtggggttagaaaacggattacgtaagttattttatttaagtttgttaataatttagagattaatattattaattttatttaatgggcgatattataaatttagaaaatttaagtaattttgtagagatgttagtgttgtggtataggtttatttgttatatgtaatacgtaaggataggtaaagagattttttttaatttgtaattattgtttttaatttaatgaataattttagagttagaatatttttaaagagagaaaagtttttttatggttggataattttaagatttttttttggagaggtttttgttaatatgtttatatttttttggttgttagtttttatgatatttatacgtattttttttgaattgttttttttattttgttttatattatttatgaagtagggttaagggtatttttttgtgttttatataataaaatattgtaattgtttgtttatgttattgtttttttttttttttttttttttttttttttttgagatggagtttcgttttattgtttaggttggagtgtagtggtatggttttagtttattgtaatttttattttttttcgggtttaagtaattttttcgttttagttttttaagtagttgggattataggcgattattattatatttagttaatttttgtatttttagtaaagatagggttttattatgttggttaggttgatgattttaaatttttgattttaagaaattcgtttattttggttttttaaagtgttgggattataggcgtgagttatcgcgtttagtttgttattattttttttttttagattgtgtattttttttatatttatatatttgatttttaatatattgtttaatatattaataaatataaaataaatgtgtgtggatttagtatgtaaataaattaaattacggattaatatgatatggttaagagtttttttaataagtaggaggaagtagtaatagtttatttttttttttgtatcgtttttttaaaaaatgagagaaatattttaatttataaattttgattaaatatttttagatatatttgttatgaaaattgttatagaaattagtttggttaaaaattagtataattattagaagtagggatttaaagtaaaattttattttgattttgttgtttttataggttttttttggttagagttaatatataaatgaagaagtttttttgggaggagtaaggttggttttatttggtgaaatattttattaatatattatattttttatttagtagttttttttatttatagaagttttaagaatttaaatatatttttttatttttaattaaaagattggttaatgtaaattgtttattagttttagaggagttataatgacgtttttttattttgtgataaagaatgtgtttagcgttttttagtaaataattgtttaatattttttatttatttaataaagatttaagtgtttataacgtatatatttacgtataggaaattaaagattgttttgatttttaaattttttggtttgtgggaaaataataagggtggtttagatattgattgttgtggaagttaaagtaatttcgttttagatattgatttattatgttgatttttgattaattttagttttaagatttttagtttatttattattttttgtgaaagagtttttatttattataaattttgttttgaggttaaataattttgatattattatattttagttatgttatattttttttttgaatcgtttttttttatggtattaagttttgggtttgaggggtaatggtatgggatttattattttgtttcgttaatacgtaagatatagatatggtttttggttttaagtttttattaaatatttttttttgagaaatttgatttgttagtttttttttttggttttttagtttttttagattttgggggtaggtttgtatagatttatttattatgtaaaagttaaaaaaaagaaatgaaattttaaaaatttttgttttattttttatagttttttttattgtatataatgatttagcgattttatatttaggtatattttaggagaaatgaaagtatatgtggattaagggttaagttatttagttattttttttttattttaaatgttagtagtgtaatattaatgtagttattattaggattattttaaaaaaatatagatttttataggttataatgtataggtaatttattgatagaaatggatagtttaagatttaattttttttttaggtaataagagaattgtataaaaaggtaaggtttgaaatgtttaaatttttttattttaaagggattagaggttatttattaatattttttatttatttttaagaaaagagtattggtagtaagttgtatttaaaaaaaaaaaaaggaaatgggttaaaggtaagtattttaaaagaagagtttatggtattttaagtagtgagtaataaagtttttatttaagttttttttaaagtggttgggaatatttgtataattattttttttttgttaagagagaaaaagaaataagaatttttaagtggatcgaggttatatttatgaatatatttgatttaatgtttatttattaaagtttataaaatttttaatttatttgttagtaaattaaatttgattatagaagatacgtttaataaattgtttttatatggttgattgtgtttttaaaataggatattttgatttttgagagaggaggtaatagagtgttcgtttatagtagttttaaattataaagtttttttagattagtaaagtattataattaattgggaagtggaagatattatattagtataaagttgtttatttagataaaagtatttattaagtaaggggagatttttttttaatattatttgttattgttataattttttaatagaatattttaatgttagaaagtaaaaatgatatattttttaaaaagaaattatgttgtatgtttattgtcgtattataagaaaatggttggatagatttttattaaatatgaaatgtacgttttggataatatagtagagttagttttttggatagggggtagattattttaggtgtggtttgtaatagagttttagttaatagaatgtaagtggtagtgattttggattttaaatttttttatatttatatatttttttttacgtttttgagttttttgtgttggatagtgacgtttataaaagttatgtttgattaagggggagttttttttagtttggtgtttttaataattgtgggaagtagagtatttatttattttttttaattttaaattattttgggttatttatgtaggaaaggaatatatttttttttttttttttttgagatggagttttatttttgttgtttaggttggagtgtaatggtaggatttcggtttattgtaattttcgtttttagggtttaagtgattattttgttttagttttttaagtagttgggattataggtatgtgttattacgtttagttaattttgtatttttagtagagatagggtttttttatattggttaggttagttttgaatttttgattttaggtgattcgtttattttagttttttaaagtgttggattataggtgtgagttattgtattcggttataaatttttaatatgtttatattatgatatatgttgagatttattattataatatttagtttatatatgattttatatgattgaatttaaaatatgggttatgaattaataatttaaaagtaatttaatttttaaaaagatagaaaatttgaatatatattttaaaggaatatatattaatggttaataagtatgtaaaaagatgttttgtattattagttattagagtaaagtaaattaaaattataatgagatattattgtatatttaataattaaatgtaaaagattgataatattaaaagttggtaggatgtggagtaattggaatttttatatattgttgatgaagtataaaatggtataattattttggaaaaaggtttagtagttttttataatatatttatttattttatgatttaataaatttatttttaggtattttttaagagaaataaaattatttgtgtataaaaagatttatgtaagaatttttatagtagttttatttatttttaatttttaagatagggtttttttttgttatttaggttagagtgtagttatgtaattatggtttattgtagtttttatattttaagtttaagtaatttttttaatttaatttttcgagtagttgggattataggtatgtgttattatgtttggttattttttttatttgttgtagagatgggtttttattatgttgtttaggttggttttaatttttgagtttaaattatttttttattttagtttttaaaagtggtagggttataggtataagtttttatgtttagttatagtagttttatttataatagaaaaaaaattaaatagtttaggtgtttagtaataggatatttaaatggtggtatatttaaataatggaattttatttagtaatgaaaagaataaattgttaatatatgaaataatttgaatgaattaaaggatggatagatagatggagtaacgtaataaaagatatagggtaaaatgttttttgtagaatttagatggtagatatatagatatatattgtaaaatttttttaatttttttgaatatttgaaattttttatttaaaaaaagtgtttgaaaattatataggttataaggtatatgtataattttttttggagggttttgggtggagggagaagtgtttaaaagaagtaagcggtttttattaagagtagttaaaattgaggaatagtaagatattaatgtgattgttaattaggacgatgtatatagtgttttgagatgttatggataaaggggatggttgtattttaattaagagttttttaattatagatgtgttttggagttagttattttttatatgggtaattatgtaaggtaaattaatagtagggattttaatagtttatgatttttttaaataaggaagaaggtagttagttttagaataaaggggagttttttaaaaatgaaaatattatatttgtaatttcggtattttgggaggttaaggcgggtagattttttgaggttaggagttttagtttagtttggttaatatggtgaaattttatttttattaaaaatataaaaattagttgggtgtggtggtggatatttgtaattttagttattcgggaggttgaggtaggagaattgtttgaattcgggaggcggagtttgtagtgagtggagattatattattgtattttagtttgggtaatagagtaagatttcgttttaaaaaaaaaaaaagaaaagaaaagaaaaagaaaaagaaaatattttgttttgtaaaaattttattattttgtttatattttttttaatttatcgagtatttatgaaaattttagtgtgaattaggatttgtatttattgggtaaggaaagagttttgggtttaagaagttgaattttaattttgtttttgttagtaagtagtggtatattttttattaagattttatttttttttggtttattttaagagtttatgaattaatttaatggtatataataaagaatagggttaagaggggagattttttaggtttttggaggagaatggtagtttttttttaaatagggaattattaaagtaatttatgagtatttagtattaatattttagtttacgaatttgagttttgagtaagagtattaggtagaatagggaaaatagggttgtagttttttgtttattattaattagtagttagggaatagggtaagatttttagattttttgggttaatttgttaatagtagatttagattagatgtggttttatttaatttaatttttttatagatgttttttgagattttgtagtcgtgggtataggttaggaatgttttttttattattaagttaaaattttatttatttaaaaaaatttttgtttaaatgttatttgttttgttcggtttatttggttattttttttatattttatagataatttttattagagtttttattacgttggagtgtaattatttgtttatgtgtttcgttttttagattagatttttagttttttaagggtgttgtttttgtcgtattggaatttgtatattttgtttcgaatagtgtttagtatttataggtgtttaaagaatagaataaacgtattaattaatttttaatgttattttttagttttaaaatgttaggtttgatattttgaagtgtaaatgagataatgaatgtaaaagtttttttatttagtcgtttaataatgtgtatagtacgtattagttattgtgattggtgttggagattttaagattgtaaaatataatttttgttttgttgggattttataattatgaaagcgtgtaaatagtattttaagaagggtattattagagtttggttttatttttttttttattgatttttttgtagttgtagttttttgtttttttttttatgagtttttaatttgtttttaagttgcgatttttgttttagttggtaaaagtgtaaaattttgaagtaattattcgagtttgtcgcggataataaagtttgtagtttcgcgttttattattcggattttttttttttgtttcggcgaatgtaaaagttcgtttgtatcgaaggggattttttttgtttagtgagtcgcggtatagtttttttaagcgtcgtttcgggggaagtcgggtttttatttgtcgacgttttcgttttttaaacggattttcgggttcgttcggggagtatagagtgtatttgcgcggttcgttgttttttttagtgttgtatttggtcgttggcgggatttcggttgttagttatagcgtgcggtttgttgtgtagaatattgtaggaggtttcggttcgtgggtttttatttttagtaggtaaatttgtttgttgtttcgagttcgtggcgattttaggtttagttaattagtattattttttcgtttcgttttttcgggaggattgttttttgattggttgttcggcgttaggtaggttaagattggaagtttaatgggttcggagtagggtttttcgaaggaggtttgaagatcggagatatttaggagggtgcggaaaggaagggtttcgttttggtttagtaattggagagtttcgtttcgtcggttcggggtgttcgggatagtcgaatttagggcggggttttcggttattagtattttttaggtcgttttgggacgcggtcgttggtggtttgttagttttgtagacggaatatttagattttgttgggtggggttttgcgttttatagttatgtttttttagtttttaaaaagttagtaattttgggttaaattattttgtataaaattaaattttgttatacgttaatgtaagtattatttgtaattaaaggatggatggatgttttttttttttttttttagttttttttaatttattcgtggattattatttattagattagtatattaattatttaatataaaaatattttgaaacgtttattttcgtatagatgggtgttgatttttttttttattagagaaaaataatttaatttagatgggaaaaatgtatttttttgtgatgggaaaaatgtatttaattttggtatattgttaaattggtttttttaaatattggagaaatttgtttttttaaattttatttttaggtaagtaggaattttgaaaagttttgtgtttttaaaaagttatgttgaagagtaaaatatttagtaatatatagtataatatttagtaagttattgattagtttgttattgtaattaaagagtttgaatgatttttatatttttttaggtgttaggatttatttttaagtattttaatatatatatatagtatatattattatttttaaattaaaagttattagtttttaattttttttagtataattatatataatgggtggatatataatagtggaaattttatatgttgtttttgattttataaaagtatgataagaattttgggtataaaagtggaattttagtagtttattggaaaagaaagttataaattgatttttagtattttatattttttttatattaaaaataattataaagatgttgttggttgtgtaatttggtgtttttttttatttgttcgatttatattgttaagattgtaaattttatgtgggttaggatttttttatttataatttattgagtatttattatatattagggattatttttagttttttgtatatttgtttagttaatttttttaataattttatgagttagatattaatattatttttattttatagattaggaaatagaggtatagggaggttaaataatttgtttaaagttatatagttattaagggatagttaggattttagttttagttgtttatttttaaagtttatagtttgttgaataaataaatgttgaaataatcgagtaaattatttttttaattaattaatataaatattaataaaataaataagagatttggagttattttttaatttttatttattatataaaaaaaagtatgttttttttttttttgtttttgttattatggatttgaatttttaaagaattatttttagagaaagaaatggagaaataagattggtttttgattttgttatattttgtattttaaaataaagggtaggtttataagtaatgataataaatttataatgttatataggaggttgggtgcgggggtttacgtttgtaattttagtattttgggaggtcgaggtaggcggattatttgtggttagaagttcgagattagtttggttaatatggtaaaattttatttttgttaaaaatataaaaattagttgggcgtggtggtatacgtttgtagttttagttatttaggtggttgaggcgagagaattatttgaatttaagaggcggaggttgtagtgagttaagattgtgttattgtattttagtttgggtgatagagtgaggttttattttaaaaaaattaaaaattaaaaaaagttatatattaggtggaagttttatcgattataattatagtttaaatgaaaatattttttaaaattagttttagttaaaaaatatttgaaattaaattaatataattatttaaaggtaattgtaagtgattggttaggtaaataaattgggttttaggttttaatattttagttatatgaatttatgggtatttttattgatataaataaaaatgttattttaaaaatgttgttttttgaagttaatttttagaatttaatgaaaataaaatatattggtataagatatattgttattaattttggtattaataaatttgaaattaagtttgtaaagtagattatgtaataaatgtttaagaaaaatatttgagtatttagttaggaatttttatagataaattttattttattagtattgtaagaaaagaatggagagaatgaatattatgtgttgttggatgataggtatataagatagtataaggggtaattattttgttttgattttatttatttttagagaggtcgagaatgttttatatattttagttttattttttttatagtggttttgtgaggtaaatttagagttaggtaaaaaggaagagaaaagaatataataagaaataaagagagttataatttagtattggttgttggttttaagagaagagaataaatattattatagttttatgatttttgtttattgtggaataggtttgagtaagttaaagaagaaggtgggatttgttttaaaaagtagtagtggtgttatatgtagtagtagtatatattttttgttttgtttatttggttgtattatatttttttcgttttaatatgaataattgtttatttgggaggaggtaatttagatgttttttggtgtttggtgatggttatagtatgagttatgttaaggagaagaatatggatgtgttttttttcgtttcggttttacgtgttacgttattgatttggtgtttgtaaaaaaaggaaatataggttaggtttggtggtttatgtttgtaattttagtattttgggaggttaagataggtggattttttgaggttaggagtttaagattagtttggttaatatggtaaaattttgtttttgttaaaaatataaaaattagttgggcgtggtggtttttgtttgtagttttagttgtacgtgaggttgaggtaggagaatcgtttgaatttaggtggtagaggttgtagtgagtcggggttatgttattgtattttagttcgggtgatagagtaagatttcgttttaaaaataaaataaaataaaaaatagaagaaatatagaaataataattgggaatttgtttttatttttattttttttttttttttttttgagacgaagtttcgttttgttatttaggttggagtgtagcggtaagatttcggtttattgtaagttttgttttttgggtttatgttatttttttgttttagtttttcgagtagttgggattataggcgttcgttattatatttagttaatttttttgtgtttttagtagagacggggttttatcgtgttagttaggatggtttcgattttttgatttcgtgatttatttatttcggttttttaaagtgttgggattatagacgtgagttatttcgttcggtttttaatttattttttatatttattaatggaggtttggaaaatgtaggataaaatattaaataattatttaaagattacgataaataggtaatatttttattaatatttttttttttatatgtttgtaaaggagtgtgtgtgtgtgtgtgagagagagttttataatggattttatagaatatataattttatattttgttttttttatttaatattattagataaaattttttttaagttattaaatttttttttaaaatgtgatattttttttttatgtttatataatttgtaattaaaggattatttttttatttatatatttttttattgagaatatttaaattgtttttttttataatagtatagtgatattttttttttatatttgtatttatttttttaggatttgtttttagaggttatttttggtttaagttatttgaattttttaaggtttttgtgatatgttgttgattgttttttgtaatgttcgagttagtttatattgttataggtattgagagtgtggattggaagtgtaatttttaagataggtgaatatttggattttggatgtttattaattgtatattttattatatttttttgagagagaaggttttttatgttatgtttagttataattattaatttatgggagttatttaatatattggatgtttgttgtgttttgggttttttgtttattgggttttgggagtataatagtaaaggacgtggatatagataaataattagataataatacggggaaaaagtgttgagagaagggaaggttagttgttattaggattatttaagaaggtcgtttaatttgaatttgttaagttatggaggttttgagtaaagttgagaaattgaataggtgttaggcgtggtgttaggagtaagtattatatgatttattttgttatcgtagaaatttagattgttaattatttttttttaaaagtttgattttatttatggtgatatggagatggtttgagtaggatttagtagtaagtaaatatttataataggtgttgagttttttttaagtttgtgtaggtttattggtttttgaatttgattttgattagtttaagtttttgcggtttatttatattttttttttgtttttgggtttttgtaaggtttgggttaattagttatgtttaattattgggatttatatgtttggattg

SEQ ID NO: 147 - DNA, 5735 bp, Artificial Sequence
  chemically treated genomic DNA (Homo sapiens)
ttttaattgatgatattttattataaaagaagtgaaaatggtttgtttttgttttaattgatgatatttttttgtgaaatttttttttttggtttattttggtttaaaagtttttttattgagtattttgtgatttttatttttgttcgttagagaataattttttttttttttttatttttttaaattttataaaatcgttttatttttgttttttttggttgattttttttttagatttagtttatttgtatttaggtgattaaaagttttattgtttatataaagtttgtttggtggtttttttatacggacgcgtatgaaatgtataatgttttgttagttttaaattatatttttaattttttattttatattttcgaaatttggatgtattttagagtcgatgatgtaattataattggtagttttttttttttatgttagtatataaaaataagggtgtattttataaatgatggtttttgagattagataaaatatttttttattagttttgtggttttttgtttgtgtattgttaggaggaaggaagtggagtattttaggtgaggtatagggttttggtattaatttttaagattttttttatggtttagtttttggtgtgtattattttatagtttttttttttatcgtatttttagttatttggtgtgtttttttatttttgttttttttgtttattagtatgtgtttgatgattgaattttgtttatttaaatgttaagagtttattagagatggtttatttttttttattttttttagtgtatgtgggtatgtgtgtttggagatgattggaaaagtatagtggttatttattaaattgatttaggggttatattagagaggaagattatgaagaaaattgagttttagtttgatagtagaagggtagagttttttgggttattggttttaagggtaatgtatatatttgttgatttaaaataataataataataatggttttgggtttttttaggttattttttaatttaaagaaattagtgggtagatatgtatatatggagtggattgggttagttttttggttttttagtatgttttgttatttttttttttttgatgatagaataagtttttgtttatagggtaaaaatttgatgttagtttggttttttggagtttttttaggattttggaagagagttgttttttttttttttgttttgttaattttaagttgtttttttgttatgtaaagagagaaagtttaagtaaagattagtataggtagagagtcggtagagcggtttgggtttttgtattttgtgaagtattacggttatttttttttgtatatgggttagtgtatttttgttttgtttaaataagtttaagttgttttttcgagttaatataagataagatattttaaatttttttttattttaaattatttttttagtttagttgttttttttgaaagttatttgtaataaataatttaagtttgagatttgggagggtagaatgtttatattttgtgttgattgaaaggagatttttgggttttaggtttttgttttggttgagaagttgtgatgataattaaagagtttgcgtagatttttattagaggtagggttttgttttgagttgggtcggggtgttaataggttgttttggatttattcgaagtttttattagggtatcggatggggtatttaatgaagtttgtattataaagttttaagaattttaggtttgaagattttttgtaaaaagtgttattatagttagttattttggtttgttataatcgataagggtttatttttttgatagtatttattaatttagtttttttgatttttgagttatgttttagaaaaagagttgagtttaaggaattatagtttggaggatatatttgatttatttgcgatggtaggaaagtatgtatttagttgatttaaaaattagatggtattattgaggagttggataggcggttttaggaataatttcgttttatattttttaaaaataggaatttatttaaaggtaatttttatttgtttttattttggtagaggtattgtgataaaggtttttaggaatgttaatagtttaggattggtattagtttatagataattttcgtttattaaattaaagtttatgagagattgatgtatgtattagagttttgaattattaggtaaggattttgttaaagttggatatgggaaggttgttatgaaatttattttaaaggttgtgtaggttaatttatttttgggaaattaacgtttattattaaattaatgtaattgtttaaaaattaaaattttattattatttaagttttttattatggtgtgtgaaattatttttagaaaattttttaaaagatatcgaataaaaggtattataggtcgggtacggtggtttatgtttgtaattttagtattttgggaggtttaggttggtggattatttgaggttaggagtttgagattagtttggttagtatggtgaaattttatttttattagaaaaatataaaaattagtcgggtgtggtggtgcgtatttgtaattttagttatttgggaggttgagttaggagaatttggtaggcggaggttgtagtgagtcgagattacgttattgtattgtagtttaggtgatagagtgagattttattttaaaaaaaataaataaataaaaataaaaataaaaaaagttattacgaaaagatatttttttattaggttagtaaattgattgttggttttaattttttaagaagttagattttttttagatatttttttgtgtttttttataatgtaattagttattttagggttagttatgaggtatatttttttggttttttttataagtaatttaattgtaaagggttagtatattattttttttttgttatttttagaatttttaattatgaaaataaaaataataattaaaaagtttttttagttgattttttttttttttttttttttgagatagagttttatttaaattttgttgtttaggttgtagtgtagtggtgtaatttttgtttattgtaatttttgttttttacgtttaattaattttgttgtttttttttttgattttcgagtagttgggattataggtgtgtattattacgttcggttaatttttgtatttttagtagatggggtttcgttatgttggttaggttggtttcgaatttttgattttaagtgattcgttcgtttaagttttttaaagtgttgggattataggcgtgagttattgcgtttagttttacgtgtatttttttttttaagggaggtaggaaagaaggtatttgggttttttatttgtaattttttttcgtgtaaatttatgtgaaggatttggagtgggatttggtggttttaagttttggttttattttttgatggttgcgcgatttgggttaagttacgtaatttttttgaattttagtttatttatttgtaaataggttaataatagtacgagattcgtagcgcgagtggagtttaaagtgtagggttgtttttggtgaatttattatttttatatttattttttgatgaagttagtataatttttatttggttaattagatatattttattttttttttcgagttcgttttttttttcgtttcgtgaagtttttgtttttttagttgttttgaaaattttatgtattagtatgtaggaaagggcgcgttaggcgggggaagttattttcgtttaagcgttttcggttttttttataaagggagggtttttttcgcgatcgtaagcgcgtttaggaagattatagagtcgtcggtgcgtagcgaggtggcgatacgcgttcgggttcggtttgcgggtggtggtttaagcgttcgtttcgttggtttggtaggcgcgattgtgcgtgcgtagtcgagggtggtggcggtcggtattttacgttaagggtggtggtggtcggtattttattttcggtcgtcgttttcgcgtgttaggtgtcgtgagaagcgcgggaggagcggtcgtaggtagcgtttagggatatgattggagtcgattttttagaagcggcgtacgtaaagtttagtttcgtacgtaaaggggaggcgatagtagaaattttaattcgataaagttcgtcggagcgcggagattcgtttttttttgttatttttcgtttcgttcgggtttcgtttcgttagtttttttaggtttttttagtcgttttagtttggtttttcgttttgcgttaacggtttttatcgtagtttgggcggtttcgcgtttattagcgggcggcgttatttggagtggtttttacgcgggaaattttagggttagttgcgttttaggagtttttgtgtgtttaagtattgtcggggtttcggggcgggggagcggttatttttagggatttttgatttcgtcgtaagaattggaaaaaatttagtatgttaaagagtttttattgaggtggtaatttgtttgcgagaatttaagataaaatttaaataattaattaggggcgttgtgaggtaaatcgttgttattatattggtttttcgggaagtaagtttaagtcgcggagagggaagggaggtcgtgcgttcggggcggggcgcgtttttaagtcgagcgtagcggtcggggtaggttgtatcgagcgtggttttggggatatcgtgcggtttcgattggaggtggttgtgatgaagcgcggttatcgtataatggaaacgtgggtattttcgtttttatgaaagtttgttggtagagtttcgaggtcggtcggtgcgtttggacgggagttcgggttaaagcggtttggtgtgcggcgcgtttcgtttttcgtaggtttcgttttgttaggtcgcgttgttttttttttatttagtttttaaaattcggaggagcgggatggcgcgttttgattttggagtgggagtgggagcgagcgtttttgcgattttagttgtgagagtcgtaagggtatgggaattgacgttatttatcgatttttagttttaattttaacgttgtgaggaaatttcgattttgttaggtttttaagggtagcggggttcggcgagcgaggtattttttttcgtttttattttaatttaagcgtttttggtattgacgacgttaagagattcgagtgggagttaaagtttttagtgagggtagtaggtgtttaggtcgggttgcgggtttttgttgacgttttgttttaggtaaaggttttagttttttttcggagtcggttgtttcgcgttattggaaatcgtattttttcgtaggttagtttgtttgtcgaggcgttgttcggcgatttttttagatggattattataggtagcgggtggcgtggtaggtattttaaaggaaattaagcgttatcgtttcgatgttcgtagcgttgtttttagattgtaggaatcgttacgcgttttgcggggaggggaagggtttggcgttgggttatagcgaggtggaaatacgtttttttttttttttaagggagagtgggttggggatgggaaggggcgttttcggttatttttttagagagttagtttcgatttttttatttaacggtatttagtttttagaggttggggtaggggcgtggggcgttcgtttttgtttttgtatttttgagtgttacgtttttttttttttgtttttagt

SEQ ID NO: 148 - DNA, 5735 bp, Artificial Sequence
  chemically treated genomic DNA (Homo sapiens)
gttggggatagagaggagaaggcgtgatatttaggggtgtagagataggagcgggcgttttacgtttttattttagtttttggggattgagtgtcgttgggtggagaggtcggagttgattttttggagaaatggtcgaagacgtttttttttatttttaatttatttttttttggagaagagaaggggcgtgtttttatttcgttgtaatttagcgttaaatttttttttttttcgtaaggcgcgtaacggtttttgtaatttggggataacgttgcgggtatcgaggcggtggcgtttgattttttttaaagtatttattacgttattcgttatttgtaataatttatttgaagaggtcgtcgggtagcgtttcggtagatagattgatttgcggggaggtgcggtttttagtggcgcgggatagtcggtttcgagaaggaattgggatttttgtttagggtaagacgttaataggaattcgtagttcggtttggatatttgttgtttttattggaagttttaatttttattcgagttttttggcgtcgttagtgttaggagcgtttggattgggatggggacggagaagggtgtttcgttcgtcgagtttcgttgtttttggggatttggtaaagtcgaggtttttttatagcgttgagattgagattgggggtcggtgagtggcgttaatttttatgtttttgcggtttttataattggagtcgtagaagcgttcgtttttatttttattttagagttaaagcgcgttatttcgttttttcgggttttaaggattgggtagaaggagggtagcgcgatttggtagggcggggtttgcggggggcggggcgcgtcgtatattaggtcgttttgattcggattttcgtttaggcgtatcggtcggtttcggagttttattagtaggtttttatgggagcggaggtgtttacgtttttattgtgcggtaatcgcgttttattatagttatttttaatcgaggtcgtacggtgtttttagaattacgttcggtataatttgtttcggtcgttgcgttcgatttgggagcgcgtttcgtttcgagcgtacgatttttttttttttttcgcgatttgagtttgtttttcggaaagttagtgtagtggtagcggtttgttttatagcgtttttggttggttgtttaaattttattttaggttttcgtaaataaattgttattttagtggaggttttttggtatgttaaattttttttagtttttgcggcgagattaggaatttttaaaagtagtcgttttttcgtttcggggtttcgatagtgtttgggtatataaaggtttttggggcgtagttggttttgagatttttcgcgtagaggttattttaggtggcgtcgttcgttggtgggcgcggggtcgtttaggttgcgatggaagtcgttggcgtagggcggggagttaagttggggcgattgggggggtttgggggagttagcggggcgggattcgagcggggcggagagtggtaggaggaggcgaattttcgcgtttcggcgaattttatcgggttgaagtttttgttgtcgttttttttttgcgtgcggagttgggttttgcgtgcgtcgtttttggaaagtcggttttagttatatttttgggcgttgtttgcggtcgtttttttcgcgttttttacggtatttgatacgcggaggcggcggtcgagggtggggtgtcggttattattatttttggcgtggggtgtcggtcgttattattttcggttgcgtacgtatagtcgcgtttgttaggttagcgaggcggacgtttgggttattattcgtaggtcgagttcgggcgcgtatcgttatttcgttgcgtatcggcggttttgtggtttttttgggcgcgtttgcggtcgcgaagggggttttttttttataagggaagtcggaggcgtttgggcgggggtggtttttttcgtttggcgcgtttttttttatatgttgatgtataggatttttaagatagttaagagaataaggattttacgaggcggggggaagggcgaattcgagggaagaggtgggatgtatttggttaattaggtaggaattgtattggttttattaaaggataaatataaaagtgataggtttattagggataattttgtattttgagttttattcgcgttgcgaatttcgtgttattattgatttgtttatagatgaataaattagggtttagagaggttgcgtgatttaatttaggtcgcgtagttattaagaagtggagttagggtttgaagttattaagttttattttagattttttatataagtttatacggaagaaaattgtagataagaggtttaaatgtttttttttttgttttttttaaaaaaaaaaatgtacgtggggttaggcgtagtggtttacgtttgtaattttagtattttgggaggtttaagcgggcggattatttgaggttaggagttcgagattagtttggttaatatggcgaaattttatttattaaaaatataaaagttagtcggacgtggtggtgtatatttgtaattttagttattcggggattaggggggaaggtagtagaattggttgaacgtgggaggtagaggttgtagtgagtagagattgtattattgtattatagtttgggtagtagagtttaagtgagattttgttttaaaaaaaaaaaaaaaaaaaaaattagttggaagaattttttaattattgtttttgtttttataattgagaattttgagaatagtagagaagaaatagtatgttaattttttgtaattaaattgtttatgagggaggttaggggagtgtgttttatagttgattttggaatgattgattatattgtaaagaaatataaaggagtgtttgaaaagaatttgattttttgagagattgaaattagtaattaatttgttgatttgataaagaaatgttttttcgtgatggttttttttatttttatttttatttatttattttttttgagatggagttttattttgttatttgggttgtagtgtaatggcgtgatttcggtttattgtaattttcgtttgttaggtttttttggtttagttttttaagtagttgggattataggtgcgtattattatattcggttaatttttgtatttttttagtagagatggggttttattatgttggttaggttggttttaaatttttgattttaggtgatttattagtttgggttttttaaagtgttgggattataggtatgagttatcgtgttcggtttgtgatgttttttattcggtattttttgaagagttttttggaaatgattttatatattatgatggggaatttagatagtgatggagttttagtttttgagtagttgtattggtttaataataagcgttggttttttagaggtgagttggtttatatagtttttgaaatgagttttatagtaatttttttatgtttagttttagtaagatttttgtttaataatttaagattttggtgtatgtattaattttttatagattttaatttagtagacgggaattatttatgagttaatgttaattttgagttgttgatatttttgaaagtttttattataatatttttgttagaatgagagtagatggaagttgtttttaagtaaatttttatttttaaaaagtataaaacgaggttgtttttaagatcgtttgtttaattttttaataatgttatttagtttttagattaattagatgtatgtttttttgttatcgtagatagattagatatattttttaagttgtagttttttgggtttagttttttttttaggatatgatttaaaaattagaggaattaggttggtaagtgttgttagaaagataagtttttatcggttatggtaaattaaaatgattggttatggtaatattttttgtagagaatttttaagtttggagtttttagggttttatggtgtaaattttattgaatgttttattcggtattttgataaggatttcggataaatttagagtagtttgttggtatttcgatttaatttaaggtagagttttgtttttagtgagaatttacgtaggttttttaattattattataattttttaattaaagtagggatttaaggtttaggaatttttttttaattaatatagaatatgggtattttgtttttttaaattttaaatttgaattgtttgttgtaaataatttttaaaaagaatagttaagttagagggatagtttaaagtagagagaggtttaaaatattttattttgtattgattcgaaggaataatttaagtttgtttaagtagaataggaatgtattggtttatgtgtagagaaggataatcgtgatgttttataggatataaggatttaggtcgttttatcggttttttgtttatgttggtttttgtttgggttttttttttttgtatggtaaggaagtagtttaaaattaataaaataaagagaaagagaatagtttttttttagggttttagaaggattttagggggttaggttggtattaggtttttattttgtgggtaagggtttgttttgttattagaaaaaaagagatggtagaatatgttaggaagttaaagagttgatttagtttattttatgtatatatgtttgtttattggtttttttgggttggaggataatttaaggaaatttaaagttattattgttattattattttaaattagtagatatatgtattgtttttagagttagtagtttagaaagttttgtttttttgttgttaggttggaatttagttttttttatggtttttttttttagtgtgatttttaagttagtttaatgggtagttattgtgtttttttagttatttttaaatatatatatttatatgtattgaggagagtggaggagaataagttatttttggtaggtttttgatatttgggtgggtaggatttagttattaggtatatgttggtaggtaagaggagtagaaataaggagatatattaagtggttgagggtgcgatagagggaggaattgtaggataatgtatattaggggttggattatgaaaggaattttaggaattgatattaaaattttgtgttttatttgaaatgttttatttttttttttttggtaatatataggtagagaattatagagttaatagaaaggtattttatttaattttagaagttattatttgtaggatgtatttttatttttatgtattaatataaagaaaggaagttattaattataattgtattatcgattttaagatatatttagatttcggagatgtaaaatggaaagttgagggtatgatttggagttgataaagtattatatattttatgcgcgttcgtgtgaagagattattaaataggttttgtgtgagtaataaagtttttaattatttgggtgtaggtgggttgagtttgaaaagaaagttagttaagggagataggggtggggcggttttataggatttgggaaggtaaaggaaaaaggggggttgttttttggcgggtaggagtgggggttataaggtatttaatgggggagtttttgagttaggatgagttaggagaaggaattttataagaaaatgttattagttaaggtaggaataggttatttttattttttttgtggtggaatgttattagttaagg

SEQ ID NO: 149 - DNA, 8776 bp, Artificial Sequence
  chemically treated genomic DNA (Homo sapiens)
ttttttgtttgtgtagagtgttatatttgggaatataaaggaagtgattaaattagtgtttgggaagtagatttggtttttttgttttttataggataattttagttatttttagttagtattattaattttttttgagttttgataaaagaattaaaattttttaataattttatttaaaattattaatgaaaataagaattattttgatggttttaatagtgatatttatattatttgttttatttggagtattttataataagtttatattaagtaaattaataaaaattttttataaaagtattatcggatatttttttgaatattaaggagaaatttatagaattgaatgaatgagaattaataagtaaatatatgtgattattgtaattattgttggtgtggggtatttgttagaattttaatgtgattattaatataggtgagaattaatttattgtgattttgtttattgtttagaaagaatatttatagtttaattatgttttttttgattaagtatagtggtttatgtttgtaattttagtattttgggaggtcgaggtgggtggattatttgaggttaggagttcgagattagtttgattaatatggtgaaattttatttttattaaaaatataaaaattagttaggtgtggtggtatgtatttataattttagttatttaggaggttgaggtaggagaattatttgaatttggaggtagaggttgtagtgagtcgagacgtattattatattttagtttgggtgatagagtgagattttattttaaaaaaaaaaaaaaaaaattatgtttttttgaagtatatatattttataatatataattgaattttttattatattattagttttgatttaatgtttttaaattattttttttgatatttttgggagatgggaaatatgtttttttatattttttgtattttatttttaatttttaattgttttattgtaatgaatatttaataagaaatagttaattggttaattgattgggtaataggttaaatatatttattttttgtttgtttttatttttttttttattttttttttttgagtaatttattttaaagttattaggtgggtggtagttagatggtggttatatattaaggtagaaaagagagtgttatgatggttttaagttagagatttagtagggtgaggattaagtaggtgtttacgtggagaaatagttcggtttgtgtgtgggagtttaagtaagtagagaaaatgtcgatatagaggggtggtttgaaaaagtagttagagtttaaatagggtatggagaatatatttagggtatgaggtgaggagggtatttatgagtgggaagggatgggtgaggttttattatataaaggggattgatgaaataagtaaataaagtatattggaagttaggtgtgttatttttgtagaaaagagttatggatttagaaagggagaaaattagtaggaattttatgaaattagattaaaatggatgtatttatgtatatttatatttttttagatagataaatggttagataggtgataaaaagataataagaggataagataattagatagatataaatgtatgtatgtgtttgtgtgtgtgtataaaaaaatatatattttttatttttttttattgatagggttaggtaataatggtattttaatagtaatgagtatatttagtggttagattttggtttattaatattattttttattgaaaggaattagagttttttagagaaatggttgattttagggttaggattaagaatgtttaagataagtttaggatatattttgtgttaggaagtaagaagatgtttaaatgatttttaagtaatgtttggaaatgatatttgaaaatgatttttaaatgatatttttaaatgatttttaaatgatatatggaaatatttaaagattttattaaagaattattagatttgataaataaatttagtaatgttgttggatataaaattaatatataaaaattagtagtatttttgtatgttaatagtgaataatttggtaaaaataaaaaatgtaattttatttataataattttaaataaaattaaatatttgggaattaatttaagagaaagatgtttataattaatattgtaaaatattgatgaaggaaattgaagaagatataaaaaagaaggatattttatgtttatatattgtaagtattaatattgttaaaaatgtttatattatttaaagtaatgtatagatttaatgtagttttttaaaatattaatggtattttttaaagaaatagaaaaaaaaaaattttaaaatttgtatggaattataaaagatttagaatagcgaaagttatttttagtaaaaagaataaaattggaggaattatattatttgattttaaattatattatagaggtataataattaaaatagtatggtatttgtataaaaatagatatagattaatgaaatagaatagagaatttagaaataattttatatatttacggtgaatttatttttaataatgttgttaagaatatatattgggggaaaagatagttttttttggtgttgggaaagttggattttaatatgtagaataatgaaattagaattttgtattttattagatataaaaattaaattaaggtggacgaaagattgaaatttggttgagtgtcgtggtttatgtttgtaattttagtattttgagaggtcgaggcgggtgtattatttgaggttaggagtttaagattagtttggttaatatggtgaaattatatgtttattaaaaaatataagagttagttggatatgttggtgcgtgtttgtagttttagttatatagaaggttgaggtggtagaattatttggatttaggaggcggaggtggtagtgagttgagattatgataatgtattttagtttgggtaagagagtgagattttgttagaaaaataaaaaataaaaaaataaaaaataaaattgaaatttgagattttaaacgatgaaattgttataagaaaatattgtggaaattttttaggatattggtttgggtaaaattttttgaagaattattttataagtataggtaattaaagtaaaaatggataaatggattagattaagttaaaaagtttttgtattataaagaaagtaattaataaagtgaagatataaattatagaatgggagaaaatatttttaaagttatattttgataatagattaatagttagaatatatgaagcgtttaaataattttgtaaggaaaaatttaataatttaattaaaaaatgggtaaaatttgaatagatattttttaaaagaagatatataaatgttatataggtatatgataaggtgtttaatattattggttattagagaaatgtaaattaaaattataatgagatattattttattttagttaaaatggtttttatttaaaagataggtaataataaatgttagcgagaatgtggagaaaagggaatttttgtatattgttggtgtaaattagtgtaattattatagagaataatttggaggttttttaaaatattaaaattaatattaaatagagttattataatatttagaaatttttatgttgggtatatatttggaagaaaggaaattatatattgaagagataatattattttaatatttataatagttattatttataaatgttaagatttggaagtaatttaagtgtttattaatagatgaatggataaagaaagtattttaattatatataatggagtataatttagttatgaaaaaagtatgagattttgttatttgtaataatatggatggaattggaggttattatgttaagtgaaataagttaggtatagaaatatagatattgtaagtttttatatatttgtgggatttataaattaaaataattgagttaatgtttgggttttagttagtgttgtatttaagtattgggagtatagtttttaaaatatattatgaatgttttaatataggaatgaatagatgagaggtataaattggttgggtgtttttttgatatatagtattttttttgatagatttagtataatttttaataggtaagtttttttatgttatgttattttatgaggaattaagtggtagaatatgatttttattatttttttttgtagaataagattaattttattagttgggatatagtgtggttgtatttgagttttaagtaattattagtttattgttattattatagagttagaggggatgagacgtttagtaattttatttaagataattttattaatatttttggttatttattatgtgtatagtattttgttaggaattagggttatgaaagtaaataatattagattgtgtttttgaggagtttatttttgttaagggaaataggtatagaaatttataatggtggtagagagaaaagaggataataggattgtgtgagggggataggaggtatttagaggaggaaatggttatatttgtgtgaggaggttggtaaggaaaaattttagtagaaggggtttgtttggttgggtttggaaggatacgtaggagttatttagagggtataggtatattttaggtagagggaatttcgtgggtaaagatgtgtaggtgtggtttgtgaggatggattttaattattttagaatgaaggtagttatggaggggtaggtgagaggagggttaatagattttatgttaatggttttatttgagtttttgataagaatttagaatttttggatttttcgataatattgattaagttttttatgattttttatagaatatgaatttaaaagaggttagtaaaggggtgtgtgcgattttttgttattggttgtagttatagttttgtttttttttttagtatataaattttttagtagtttggttgaagattgttgtgtagggtagggaagttttaggtaaatagtttagtaaatagtagtatttagttaaaaggaagatttatagaatatagttgaagaaggaaagtggcgatggattttattttaaatttggcggtggaaatttggttttttttggttgttagtttggtgtttttttatttgtgagtaattgtttaaatttttttttttgtttttttggatttggggtgttaatcgggtttttttttttttatttgttttgaagattaaaagagatgtttaaggagaagtagttgaagtgttggacgttataaacgtatagaagttattattattttatgtagatttatgaatgaataaataagtattttttttatttattttttaattttggtgattaggagggtttagggatagtatttggtagtgggaatgatttgattagtttagatttgacgaagattaattaatgaaaatatggtagcggtagattataaattgttgattatgatggatagtgtgatttttattttttttttaggttttggggattttgggtataggaaggagtggtttgtatttttgttttattaattcgttttttgggttttgtgtttgttggaagggatgtgtagttgtattgtttttgtagatttggtttttgttttttcgttttttaatttaggatattatttatataacgtattaggggatattaagattttatgggaagttgttttttggttttttttttttttttgtgttatgtttttgaaaatttttttttttttatgagttatttttttattttgttatatataggatggtttattttgtaatgattaatttttagagtaaaggagatttggaggaagtttcgaggatttattttttgttttaattttttttttttcgtttttgggaggttaggattaatatagagttttgttttttatttaatgggaatttattagtagtttgaaaaggtaggagttatgaaagttaatttggattttatatattttttttttttatgttatagtataggagggtaaatttttttattggtgggatttttggtattttagagtaggtggagagaagagttattttttattgtgggtagtggaggttttatttgttttattaatttttattttaatttgatttttattaagagtagggaattataatgatatgaaaatagatattataaattttattttaatttttttatagaaagtttaggaatttagtgagttgtggtaatatggtttttattgtttaatatttttaaatgaattgatatggtttaaatttatttatttttaaattagaattttttggagatagattatttttagtatgttttttttggatggtaaaatagggttgttagtttagtatttgtgataataagtgtgtgtaaaataatgttattttttttgaatgttaggaatatgagtttaatgtataaatgtatatttttaagataagattgtacgtttttttaaatatatttgttcggttatttattttaataattttttttcgaatatatttgtttagtagattgttttaaatttttaggataggggagtaagtaagattgtgagttagtgacgatagtaaaggtttttaggtaggatttatatgaagtgagaaaatattttttagtttttagggtagaattttaaagagatatttatgggttttggttttatcgtggaggttatttaaagggtaaataggttggtattttatttgttttaagtttggatataggggtattatttgtgttattttgtgtgtggtttgttatgttgtgggtcggttattatagattcgggtagttaggtagataatgttttagttttagataatgttggtgtagtttaggagttagaaaatgtagtgtagattaggttttttttaggttaatataattatatgtaatagatgattggtttttttgttagtttttttattggatttaaaggttgtattattttattagaggggagttggaaagaaattaaagagttcgtttagtatagtatttgttttgatatggtattatgtgaatttagatatttattaagatttttttttgggggttaatgttgttgatatattaatttaatagtttgtttttatttgagaggttaggtaatgtgtttaaagtttaggagtagagattagtgttattgatttgatatggttgtgataataaaggagggaattgaagtgggaatatttaaggttattttggttttggtaggtggtgtacgtatttttattaattgttttggggtagggaattaaatgtatgattgggtttgtttatgttgtttttgttgagttttttaaattttgttttttatgtaattttttagttttattttattatattttataagttattggatgtttataaaatgtttggaatttatattgttttgaaggttaatttttaaagaggagtaaataaggttttaatataatttttcgggacgttttattattatttattttatatgttatattgtattatttgttattaataggaaagtatttggattttggaaggtttttttgtgttttttagttgaaagtatatatgaggtatgtggatttttttatgtatattattttttttagttatatttttgtagtttgtttttttggagttaattgtgtggggttagtagttttatagttgaattagtgtttggtaatttttttttttagttttttttttttttttagttttttattttttagttatatcggagggggaaggtttgtaaggatttagaattattagttggaggagtttgtatatgatttatgaaagatgagttttaggtaggtttgttatagtgaatattaggtttaatgggtttttttttagagatattttacgtatagaggtagtgaattgattgttttttggttgattattttgaaaaagatgagtgtgtttggtattgtgttttttaggtgagtatgatttgagaagtattagttgttggtttttttgtatataattatttaaggatatatggattaattattttttttaatagtttaaattaattagattatttgattatagagattgaggtgtatttgaaagttgtttatatttttataaggttaatagaagttatgaatatagttgttaatttgtagaaataaggattttatgatttttttaaggtttttttgtgaatgaacgtttaagaagggttagattttaaaatagggttagagtttagagggaagaaaaagtataaatatttttgagtaaattgtaagggtagtgttattataggtttttagtgattttttgtgattgagtgtatatagtgatgtaaaattttattattagtgtaaaagataaaaaaaattttattttttttatttaggatgagagtttttaaattagcgaagagtttatttattaaatagatataaggaaatgaagtgttttggaagaatttttgtttgaattttttaggagtatttgaggatatttattaagtatttattttaggattgggattatgaagattttagttgtttttagttaattattgagattttttaggggttttagaatagttaggaaaggatttgatgagtgaatgtaattattgatgttggagttgttgttattatttatcgtgtatatattattttttttttttgattattttagtttttgagtaatttattagttttttgatttataaagttataatttttgtgatttgatttttgttttattttgtaga

SEQ ID NO: 150 - DNA, 8776 bp, Artificial Sequence
  chemically treated genomic DNA (Homo sapiens)
tttataaagtgaaatagaaattaggttatagggattgtgattttatagattagagggttggtgagttatttaggaattggaatggttaagagagggaggtaatatgtatacgataaataataatagtaattttaatattagtaattgtatttatttattaggtttttttttgattattttgagatttttgaaaagttttaatgattagttgaaagtagttgaagtttttatagttttaattttggagtgaatatttgataaatgtttttaaatgtttttgagaggtttaggtaggaatttttttaggatattttatttttttatgtttgtttagtaagtggatttttcgttgatttggggatttttattttaggtagaaagagtaagattttttttgttttttgtattgatgatgagattttgtattattgtatgtatttaattatagagggttattgggagtttatggtgatattgtttttataatttgtttagaaatgtttatgtttttttttttttttaagttttgattttgttttaggatttagttttttttaaacgtttatttatagagaggttttggaggagttatggagtttttatttttatagattgataattgtgtttatggtttttattggttttatagaaatgtgggtagtttttaggtatattttagtttttgtggttagatgatttggttgatttgagttgttgaggaggatggttgatttatatgtttttgaatgattgtgtgtagaagaattagtaattaatattttttaggttatatttatttgagaagtatagtgttaggtatatttattttttttaaggtggttaattagaaagtagttagtttattgtttttgtacgtgaagtatttttgaggaaaaatttattaagtttggtgtttattatggtaggtttgtttggaatttattttttatgagttatgtgtaaatttttttaattgatggttttggatttttgtagatttttttttttcggtgtgattgagggatggaaaattggaggaagaagagaggttgaaggaagaggttgttagatattgatttagttgtgaagttgttagttttatatagttggttttagagaggtaaattataaaaatgtggttgaaaaagatgatgtgtataaaagaatttatatgttttatatgtatttttagttaaaagatatagagggattttttaaagtttaggtatttttttgttgatagtaaatggtgtagtatggtatataagataagtaatgataaaacgtttcggagagttgtattaagattttgtttatttttttttagaggttagtttttaaggtagtataggttttaaatattttgtaaatatttagtgatttataaaatgtgataaaataaaattgagaaattatatgaagggtagggtttggaggatttagtaggggtagtatgagtaggtttagttatatatttggttttttgttttagaatagttagtggaagtgcgtgtattatttgttaaagttagggtggttttgggtatttttattttagtttttttttttgttgttatagttatgttaaattaatgatattaatttttgtttttgaattttaaatatattatttgattttttaggtgaggataagttattgagttaatgtgttagtagtattggtttttaaggaaagattttggtgagtgtttagatttatatggtattatgttaaggtagatgttgtgttgggcgaattttttagtttttttttagtttttttttggtagagtaatgtagtttttgggtttagtgaagagattaatagaaaagttagttatttattgtatgtaattgtgttggtttaaggagggtttggtttatattgtattttttgatttttgggttgtattagtattgtttaaggttaaggtattgtttgtttggttgttcgagtttgtagtgatcggtttataatatggtagattatatatagagtgatatagatggtgtttttgtgtttaggtttgaagtagatgagatgttaatttgtttgttttttgagtgatttttacggtggggttaggatttatgaatatttttttggagttttattttgagagttgaggaatatttttttattttatatggattttatttggaagtttttgttatcgttattggtttatagttttgtttatttttttgttttgagagtttaagataatttgttaagtaggtatattcgaaaaggagttattaaaataaatggtcggataggtatatttgaaaagacgtgtagttttgttttagaggtatatatttgtgtattagatttatatttttgatatttaggaaaggtgatattattttatatatatttattgttataaatattgaattaatagttttgttttattatttagaaggaatatgttggaaatagtttatttttaaaaaattttggtttaaaaatgaatgaatttaaattatattaatttatttaaaaatgttagataatggaaattatgttgttataatttattgaatttttaagttttttgtgaaagaattaaaatgaggtttatagtgtttatttttatgttattgtggttttttgtttttaataaaagttaaattgaggtagaagttaatgggataggtggagtttttattatttatagtggaaagtaatttttttttttatttgttttaggatgttaggaattttattagtgagagggtttgtttttttgtattgtaatataaaggggaaaaatatgtaaaatttaaattggtttttatggtttttgtttttttaggttgttagtagatttttattaggtgagaaataaagttttatattaattttagttttttagagacgggaggaaaaagattaaagtaaagaataaattttcgaaattttttttaggttttttttgttttagaggttaattattgtaagataaattattttgtgtatgatagggtggaggagtgatttataggagggaggggatttttaggggtatggtataggaaagagggaagagttaggggatagttttttatgaagttttggtgttttttggtgcgttatgtaaatgatattttgggttggaaggcgggggagtaggaattaggtttataggggtaatatagttatatattttttttagtagatatagaatttagaaagcgaattaatgagataaaaatgtaagttatttttttttgtatttagaatttttagagtttgggaaggggatgaggattatattgtttattatgattagtagtttgtaatttgtcgttgttatgtttttattgattagttttcgttagatttaagttaattaaattatttttattattaaatgttgtttttaaatttttttagttattaaaattagaaggtggatgggagaaatgtttatttatttatttatagatttgtataagataataataatttttatgcgtttgtagcgtttaatattttagttatttttttttgaatattttttttgatttttaaaatagataagggaaaaggggttcgattagtattttaagtttaaggaaataaagagaggagtttggatagttatttatagatagaggagtattaggttgatagttaggagaagttaggtttttatcgttaaatttgggatgaggtttatcgttattttttttttttaattgtgttttgtgagttttttttttagttgagtgttgttgtttgttgggttgtttgtttggagtttttttgttttgtatagtagtttttagttaagttgttgaaagatttatgtgttggagaaggaggtagggttatagttgtagttaatagtaaagaatcgtatatatttttttgttgattttttttgagtttatgttttatgaggaattatgaaaagtttaattagtgttatcggggagtttaagggttttgggtttttattagaaatttaagtggagttattggtatgaaatttattaattttttttttatttgtttttttatggttgtttttattttagaataattgaaatttatttttataagttatatttatatatttttatttacgaaattttttttgtttggagtgtatttgtgttttttagatgatttttacgtatttttttaagtttagttagatagattttttttgttaaaatttttttttattaatttttttatataaatgtaattatttttttttttgggtgttttttattttttttatatagttttattgtttttttttttttttattattattgtaagtttttatgtttgttttttttagtagaggtgagttttttaagggtatagtttggtattatttatttttatgattttggtttttagtagggtattgtatatatggtgggtaattaggaatgttggtggagttgttttgggtgagattgttgggcgttttattttttttgattttgtggtgatagtaatagattaatggttgtttgggatttaaatgtagttatattgtgttttaattaataaagttggttttgttttgtaaaggaaaataatagaaattatgttttgttatttaattttttataaggtaatataatatgaagagatttatttgttgagagttgtattgaatttgttaaggaagatattgtgtattagaagaatatttaattagtttgtgttttttatttatttatttttgtattaaagtatttatgatgtattttaaaagttgtgtttttagtatttgggtataatattgattaaggtttagatattagtttagttgttttgatttgtagattttataagtatgtgagaatttgtaatatttgtgtttttgtgtttggtttattttatttaatatgatgatttttagttttatttatattattatagataataggattttatgttttttttatggttgaattgtgttttattgtgtataattggagtattttttttatttatttatttgttgatggatatttaggttgtttttaaattttggtatttgtgaatagtggttattgtgaatattggagtgatgttatttttttaatatatgatttttttttttttaggtatatatttagtatggggatttttggatattgtggtagttttatttaatgttaattttaatgttttgaggaatttttaaattgttttttatagtggttgtattaatttatattaatagtgtataagggtttttttttttttatattttcgttggtatttgttgttgtttgttttttggataaaaattattttagttggggtaagatgatattttattgtggttttgatttgtatttttttaatgattagtgatgttgagtattttattatatgtttatgtggtatttgtatgtttttttttgaaaaatgtttatttaaattttgtttattttttgattggattattagatttttttttatagagttgtttgagcgttttatgtattttggttattaatttgttgttagagtgtgattttgaaaatatttttttttattttgtggtttgtgtttttattttgttgattgttttttttgtggtatagaagttttttaatttgatttgatttatttgtttatttttgttttggttgtttgtgtttgtggggtagttttttagaaagttttgtttagattaatattttgaagagtttttataatgtttttttgtagtagttttatcgtttgaggttttagattttagttttgttttttgtttttttgttttttgtttttttgatagagttttatttttttgtttaggttggggtgtattgttatgattttagtttattgttattttcgttttttgggtttaagtgattttgttattttagttttttgtgtagttgggattataggtacgtattagtatgtttagttaatttttgtattttttggtagatatgtggttttattatgttggttaggttggttttgaatttttgattttaagtgatatattcgtttcggttttttaaaatgttgggattataggtatgagttacggtatttagttaggttttagtttttcgtttattttgatttgatttttgtgtttggtgagatatagggttttagttttattattttgtatgttaaaatttagtttttttagtattagaagagattgtttttttttttagtgtatgtttttgataatattgttgaaaatgagtttatcgtaggtgtgtggaattgtttttgggttttttattttattttattggtttgtgtttgtttttatataagtattatattgttttggttattatatttttgtagtataatttgaagttaggtaatatgatttttttagttttgttttttttgttgaaggtagttttcgttattttgggttttttgtggttttatataaattttagggtttttttttttttatttttttgaagaatgttattggtattttgagagattgtattgaatttgtgtattgttttgggtagtatggatatttttaataatattaatgtttataatatataaatatggaatattttttttttttgtgttttttttaattttttttattagtgttttataatattaattgtagatattttttttttaagttaatttttaggtatttagttttatttggggttattgtaaatgggattatattttttatttttgttagattgtttattgttggtatgtagaaatgttattggtttttgtatgttgattttgtatttagtaatattattgaatttgtttattagatttaatagttttttagtggagtttttaagtgtttttatatattatttggaaattatttggaaatattatttggaaattatttttaaatattatttttaaatattatttggaaattatttgaatatttttttgttttttggtataaaatgtattttaggtttattttgaatatttttaattttggttttggaattagttatttttttaaaaagttttggttttttttagtggaaaatggtattaataagttaagatttggttattaagtgtgtttattgttattgaaatgttattgttatttagttttattagtggagagaagtagggagtatatgtttttttgtatatatatataaatatatatatatatttatgtttatttaattattttgtttttttgttatttttttattatttatttaattatttatttatttagaagggtatgaatatatatggatatatttattttaatttaattttataggatttttgttagttttttttttttttgaatttatgatttttttttgtaaaagtgatatatttggtttttagtatattttatttatttattttattaattttttttatgtagtgaaattttatttatttttttttatttatggatgttttttttattttatgttttaaatatgttttttatgttttgtttaggttttggttgtttttttaggttatttttttgtgtcgatattttttttgtttgtttggatttttatatataggtcgggttgtttttttacgtgaatatttatttgatttttattttattaggtttttgatttggaattattatgatatttttttttttattttaatgtgtggttattatttggttgttatttatttaatgattttaggataagttatttaggaagggaaagtaaagaaagaagtgggaatagataaggaatgagtgtgtttagtttgttgtttaattaattgattaattgattgttttttattaagtgtttattgtagtaagatagttgggagttgagaatggaatgtaagaggtgtaagaaaatatgttttttattttttagaaatattaggggagatggtttgaaaatattaaattaaaattaataatataataagggatttagttgtatgttataaaatgtatgtgttttaaaaaggtataattttttttttttttttttgagatggaattttattttgttatttaggttggagtgtaatggtgcgtttcggtttattgtaatttttgtttttaggtttaagtgatttttttgttttagttttttgggtagttgagattataggtgtatattattatatttagttaatttttgtatttttagtagagatggggttttattatgttggttaggttggtttcgaatttttgattttaggtgatttatttatttcggttttttaaagtgttgggattataggtatgagttattgtgtttggttaaaaaaggtataattaaattatgaatgttttttttaagtaatgggtaaagttatagtggattaatttttatttatgttaataattatattggagttttgataaatgttttatattaataatggttataatgattatatatatttatttgttggtttttatttatttagttttatagatttttttttaatgtttaggaaagtattcgatgatatttttgtaagaggtttttattgatttgtttaatataaatttattatagaatgttttagataaaatagatgatataaatgttattgttagagttattaaaataatttttatttttattaataattttggatgaaattattgagaaattttgatttttttattagagtttaggaggagttaatggtgttaattaggggtggttgagattgttttgtgagaaataaagaagttaaatttattttttaagtattgatttggttattttttttatatttttaagtataatattttatatagatagggag

SEQ ID NO: 151 - DNA, 7924 bp, Artificial Sequence
  chemically treated genomic DNA (Homo sapiens)
ggtgtttttttttttttttttatttttattgttttttatgtgttatgggtttgtttttttagtgatttgcgaaagtggagtatcgaggtaggagggaaacggtaattagggagttttcgagtttggggttgttttatttttatttatttttcgattagagttttgtttttgtttggttgttcgtttgtttttttggggaattgagtttagaggtaggtgttttagagaaggaaataaaatgaggggtggtagggataaaaagttatttttattttttattttttatgtagtatgaatataatttttttttatttggtttttaaatttaaagatgtggattaaggtttgtgggtattttaggggtaaggagagttttggggttagtgatattgttaggttaattatgtattttataaaggggagtatttggaaatgaaggattagtttttatgtattaggttaagagtaagggagagttggttagggatagtagtttgtatagtagaggggaatgtagtaatagtagggttttttaggttttattttttattttttaggtaagaagagtatttttttagatttttaggcggaggattgagtttagtttttagtaattaaggtttttttgggatttaaagtttatgggagaagggtaaagattttatgggaagagagaaggaaggttttgggtagaaacgtttggtgttgttttttttggtttttaagataaagcgtttattttgttttttattttttgataggtttgagggtttgttaattatattgtggttataggtggagggaagaggatttttttttttagagtgttatgtttaggaagtttttttaattttatatggtttaagagtagttcgtaggaggttttttaaagacggaataagtaatttattagttttattggggtttttgtttatcgttttaaggtgggcgaggtttaggaagagggttatttttaagttatatattagttgtattgcgtggttgtagttaaaataaagaattgggtgttgagtatttattaattaagaattaaaatttagggtatttatatgtgaaggataagaattttatttttttatttttttaaaaagaagtggggaaagaattattaaatttttttttttgatttattaaattaggaaaatagtaggagagggtggtttaggatttagggatagggtatagtttagatggtggaaagtaaaggagagtaggaagttgtaaattattggttaatgagaaaaggagatagttaattttaggatgaagttgtgattaggttggagttgtttttttgaagatgggattttttgggtattaagatttatgttatattatattggggttagggaagtaggtgatgttagtttttaagtttgtttttagttagggatttgagaagttatattgggtagtggttttaatttgtggattagtattttagttttttttgaagattaggtagggtgttatttattgttttttttttttagtttttttaggaaagaaggattatatttgtattgtattttaggggttttggaagggaaaatatggaattaggattttatagattgataggttttatttataagggttatgattgggaaaaggtatgggagtagaaggagaattgggattttagggtgtagttacgtttattttaaatttttggtggtttggggtatgttttgaggtttagattgttaattaggttttgttggtttgtttattcgttattatttttgtatttgttgttttgagattttatttagttttaggtacgttatttgtttttgagtttttattatttttttgtgacgggtgaatttcgtgtattgtgtttcgggtttatatatgaattgtgagtagggtttatttattttaaatatagatgtttataaaataaagattattttaaattatcggtgtggttgtttggatgagtttttgggggtaggttttatttagattttggtagtgatgtgggagggagagaggtagtgttggtagaagtagttttagaagtaaaggtaatagtagtagagtgattacggaagcggtaaatattgtttttttttttttattttttttagtgttatttgtagggaggtttaaagtaaagtttcgttgttttgtattgggttggtattgtagaaataagatgaaatatagttatcgagaggatgttgaatatttatgagtaggttttaaagttaagatgagttttatttgtttgtgtgggttaggaacgggtttttttgaaggtatgaggtgggattggataattttttagatttgtgattggatatttcgggggagtagaggtagattgggattttaggattgtaggtattttatattttgggatatggaattgatggaggtggagaatattggggataaggattgaatgaagaaaggagtaggataacgtaggataatagtagttttaagatttttattatattttattcggtattagtgatagataaatttttttgattttaattattatcgtgtgagatggggagggtggttatttatttaggttttataggtaaggaaatagatgattagagaatttaaagatttggtcgggtgtagtggtttatgtttgtaattttaattttgggaggtcgaggtaggaggattgtttgagtttaagagtttgggattagtttgggtaatatagtgagatattgtttttagaaaaaattagttgagtgtggtggtttgtgaggttgaggttagtggattatttgagtttagaaggttaaggttgtagttgtattattgtatttttgtttgggtgatagagaaagattttgttttaataaaaagagtttaaagatttgtttaagggttcgaagtaatagtggtagaattgtggttgtaaattattgaattggaattattggagggtaaagttttggtatttttagaaaaatttttataaataatttttatttgtagttagaattaagaattattaatttaggttttttgtttaagttagtgttgtgtttagagtaagtattgttttatagaaagttataagaattatacgttgtttagtgtatgtttaaagttgtaagtttttggaaagcgaggttagtttgaggtaaatttggagatagagatattttaggagagttttattaagtatattttattaggaaaggtgagaattttgggagtttgaagggtttaaggttatattaggagaaaagggatggtatgtatttaaggaagagggaatttttatattttttattttgggaatttttatggtttttttgaagaaggtttgtaaaagagtagagaataagaggtgtttttggaggtttagagagtattagggggaagttttaggtatgtatataaattcggtaagttatagttttgtttattattagtgttaagtttttgtgatttagtggtttggtggggatttttttttattggttgtttttaggaattttatttagttttagtaggggatatatttttttttatattttttgttattttttttgtttatttaggtaatggaaatttgtttttagggagtagttagttgagatatatggtttttgtatatttgaatagttatggaaaagttgtaaggtagtttggcgttttttggtgataattattttattttattttaataaattagatttttaagattagttgtttttcggatttgtttattttttgttttaaggagatagtttttaatggatgtgtttttgtgaaaatattttagtaaatatttgttttgttattgaaattttattttaaaattttaaagttaggttaagttttattgttagttttattgatgaagaaattaaggtatttttaaaagagtaatttgttgagttggcgggtgtttgggttttttcggtttttgtggtttttaggggtgggtttttgagatggtttttagtagatgttttgcgatgtattgtacgttttttgttgaaagtattaggggtgatttgtttgcgtttggaattatagtagttttaattttttttatatatttttttttgtgggaaggtgattagtataaattcgttttgaaaagttttggggattaaatttttgtttgagaggaaggtaggtgtagtttatttattaagtttatttatttgttttgtgatttttttttattatttttttagtaacgattgagttttatgatttgggggttgggggatgaggtggaggtgggggatataatataggagatggtatagtgtaggggtagaggttggtgtgttttttaggataagtggtattacgtattgaaagattttttaagataaatataattttgtttttttagtttggtaagagttgaggtattgaaaatttttttttttttttagaaaatgatatattttttttttaagggtttttttgattttgttttggtggaaagtaataaagagaagaacgtgaataggaatatgtatattttagttgttatttgagttttatggataggaggtttaatttttttttttattttttagattttcgtagattttgtttttttattgtataatttagagattgatatttagtaggtatttaataaacgtttgtgttaaatgagaataatttgatggggtaagtaggagttaattttgtattttttttttttttttttttttttttattcgatttttagggttttggttttttgtaagtagtgaattatttatttttgtttatagatattaaattggttttttttaggttgtagtagggtggggcggggaggcggttttgtttagtttgttaataggaggagtaatttttttgtttaaatagtatttataggtggggatttgtttttgttaagttattttggggatgtttaaagttttattgttagattttttttgtttttttttttggttttttttttttttttatttttttaataggtttataagtgggtttaggtttttttgcggggtttattttgcgttttattatggtttttattgttaagtttttttatgattttagtgttattagtttggatggggagaaggtagattttaatacgtttcggggtagggtcgtgttgattgagaatgtggtttcgttttgaggtataattattcgggattttatttagtttaacgagttgtaatgtcgtttttttaggcgtttggtggtttttggttttttttgtaattaatttggatattaggtgaggggtttttttttgtaatgtattaaaagtgttgggttggtgtagtttaggtgggataaaaggagaggttgaatgattatgttttggagtgtttggaataatggggtatgttttgttaagttaggtttttaggtgtatgtgatatattaagagaaggtatatattttttaagattaaatattgaggttgtgtgatttttatagtttattgtttttttattatattattttatgagggttggttttaggtttgtgtttttttttattgtgtttttagtgtttagggtatagaaagtatttattaaatatttgttgaataaatgagtggagaaagtagaggttaggaattaaataagaattggatagatttaagagattttagttttagttggatttggttttgttatttaatggttttgtgttttcggaaagggcgttttatttttcggtttagtttttttatttgtaaattggggataatattatttagtttataggattattatgatgtttaggggataggatatataaaagtaatttgaaaaatataaagtattatgtaaatgtaagtaaattgttatttagattgaggatgatttttgttggtttaaattagttaagtggaaagaaaataagtaggaaagagaaaggtttttaaaaggtacgtgtttttgggtattatatgtatttatttttgattaatgggttaagttgttatagatttttagtttatatatttcgagtttttttttagggatttttttatttttatttatgattttaacgtataagtagggagaatgaatttaagcgaattttttcgttataatttttttagtttaatttatagtggtatgaaggtgaggaagataggaaagtaggaaggttgaagtattattggttgtgataaatttgagtttaaattgtttattgtttttattgtttttttttaagttttttgtttggttttttttagagtaggagagatagaagtagtaaattttttttcgagatgtttttttagttttagaagtatttttagttttatattatttttttagtttagtaagttgttggagggagtttataatttattaggagttagttagttatttgtattaagaaatagaaatttgttagggtatagtggtttatatttataattttagcgttttgggaggttaaggtaggtagattgtttgagtttaggagtttaagattagtttgagtaatatggtgaaattttgtttttataaaaaattgtaaaaattagttaggtatggtggtatgtgtttgtagttatagttatttgggacgttgaagtagtaggatcgtttgagtttgggaagtcgaggttgtagtgagttatgattgtgttatcgtattttagtttaggtgatagagtgaggttttgttttaggaaaaaaaatagaaataaaaatagagaagtttattagagattagttttgggtttatgatgttatgatggtttggaattgattgaattagttagtttttataggttagaagtaggaatttttttttagaggaaggtatttgtttgttaaattggaaaggtagaggtggaaaagaagggtttttataggttttttggattgttatgaatggtgatgttgagagggaataggatagggatggtagtggggagggaaaggtagggattaggttttgagttaaagtatgcgtagttgagagtagtgagtggataggaggtgtagtagtttttgggtagtagtttatttaagaaaagaatgataattatatatttataatttttagttattaagtatttatttttttaattttttttttttttggtttattgttaaattttaaattttgtattttatttattttatgtttgttggttattaagtagttttatttagagtatatatttattgttgttttgaatttgttttgttgttatggtatttgaaaattagatgtttttggatgggggtttttttttattaaagtttttttttatttgtattttagttttaggataaggtaagaagaaagtaagaagttgtaaattttatttttttgggttttaattttatttttagtttaaggagttgagtaggtagaggtaaaggttatatttaatatacgtgtaattgaaagtaggcgaggtaaaattagggtagaggaaaggaaaggggtgtgtgtgtaggtatggatttatgggtaggtgggtcggtaggttagttgaagaggaggttttaagtagtataatttaagtttttttttttttttttttgttttaaatattttaagaattgtttagggtagattggagataaaagtaatagtttagaagtgttaaattttgaagagtagttaaagtatgggtaataaagtgagattttatttttataaaaaaaaaaaaaaattagtcgggtatggtggtttgtgtttgtagttttagttattaaagaggttgaagtaggaggaatgtttgagtttagaagtttaaggttgtagtgagtaatatttcgtttgttttgttttttttttttttatagtgaaaaagaatgattttggggagggagtgtaggagggtgaaagagttttatgttgtggatttttttttttttttatttattgtttacgtattttgtttttttttttttttagg

SEQ ID NO: 152 - DNA, 7924 bp, Artificial Sequence
  chemically treated genomic DNA (Homo sapiens)
tttaggggaggaaaaagataaagtgcgtggatagtgggtgggggaagagaaagatttataatatgaaatttttttatttttttatattttttttttagggttatttttttttattgtgaaagagagagagataagatagacgaggtgttgtttattgtagttttgaatttttgggtttaagtattttttttgttttagtttttttagtagttgagattatagatataggttattatgttcggttaatttttttttttttttgtagagatggggttttattttgttgtttatgttttggttgttttttaagatttagtatttttgagttgttgtttttgtttttagtttattttgagtagtttttaaggtgtttgaagtagaagaaagagaaaagaggtttaggttatattgtttagaattttttttttaattaatttatcgatttatttatttataaatttatatttatatatatatttttttttttttttttgttttggttttgtttcgtttgtttttaattgtacgtgtgttgagtatagtttttgtttttgtttatttagttttttgaattgagggtgaaattgagatttagaggaatgggatttatagttttttgttttttttttgttttgttttagaattgaagtataaatgggaagaagttttgatgaaggaagatttttatttaagaatatttagtttttaggtgttataatagtagagtaagtttaaggtaataatgaatgtgtattttaaatggaattatttagtaattaataggtatgaagtaaataggatataggatttagggtttggtaataggttagggggagggggagttgaggaaataagtgtttgatggttaaagattgtgagtatgtaattattattttttttttgagtaggttgttatttaaagattgttgtattttttatttatttattgtttttagttacgtatgttttggtttaaaatttggtttttgtttttttttttttattgttatttttgttttatttttttttagtattattatttatgataatttaaaaggtttatgggaattttttttttttatttttatttttttaatttaatagatagatatttttttttgggagaaagtttttgtttttgatttgtgagaattaattagtttagttagttttaggttattatgatattatgagtttagagttgatttttagtggatttttttgtttttgtttttgtttttttttttgagatagggttttattttgttatttaggttggggtgcggtggtataattatagtttattgtagtttcgattttttaggtttaggcgattttgttattttagcgttttaagtagttgtgattataggtatatgttattatgtttggttaatttttgtaattttttgtagaaataaggttttattatgttgtttaggttaattttgaatttttgagtttaagtaatttgtttattttagttttttaaagcgttgggattataggtgtgagttattgtattttggtagatttttattttttgatataaatggttggttggtttttggtaggttatagattttttttagtaatttgttaggttgaagagatggtgtgaggttggaggtatttttggggttggagggatatttcgaaagagggtttgttatttttgttttttttgttttagaaaaggttagatagaaaatttagggaagaatagtgagagtagtgaatagtttgggtttaggtttgttatagttagtgatgttttagtttttttgtttttttgttttttttatttttatattattgtgaattgaattaaggggattataacgagagggttcgtttgggtttattttttttgtttgtacgttaaaattataggtggaaatagaagaatttttaaaagagaattcgaggtgtgtgggttgaagatttataatagtttgatttattaattagaaataggtgtatgtaatgtttagaggtacgtgttttttgaaaattttttttttttttgtttattttttttttatttggttaatttaaattaataaaaattatttttaatttaaataatagtttgtttgtatttgtatagtattttatattttttaagttatttttgtatattttgttttttaaatattataataattttatgagttaagtggtattatttttaatttatagatgaggaaattaaatcgaaaaatgaagcgtttttttcgagggtatagagttattaaatagtaaaattaagtttagttagagttaaggttttttgagtttgtttaatttttgtttgatttttggtttttattttttttatttatttatttaataaatatttaatgagtgttttttgtgttttaggtattgaggatatagtggagagaaatatagatttggaattagtttttatggagtaatatagtagaaagatagtaaattataaaaattatatagttttagtgtttaattttaaaaaatatatatttttttttggtatgttatatgtatttaaagatttagtttaataaaatatattttattattttagatattttaaaatatggttatttagtttttttttttattttatttgagttatattaatttaatatttttggtgtattataaggagggattttttatttgatgtttaaattggttgtaagggaagttaaggattattaggcgtttgggaaagcggtattgtagttcgttgagttgggtgaagtttcgggtggttgtgttttagagcgaagttatatttttaattagtacggttttgtttcggaacgtattgaaatttattttttttttatttaggttgatggtattgaggttatagaaggatttggtaatgaaagttatggtgaagcgtagagtgagtttcgtagagaggtttgagtttatttatgagtttattagaggggtggggaggaaggaggagttaggaaggaggatagaaaggatttaataatggagttttgagtatttttaggatgatttagtaaaaataggtttttatttgtaagtgttgtttgaataaggaggttgttttttttattaatagattgaataaggtcgttttttcgttttattttgttgtaatttgggaagggttaatttgatatttatgagtagaggtaaataatttattgtttataggaaattagagttttaaaggtcgaatggagaggaaaaaaagggagggagggatgtaggattgatttttatttgttttattaagttgtttttatttgatatagacgtttattgaatgtttgttgagtgttaatttttgaattgtatagtgagagggtagggtttgcggagatttgaaagatgaagaagagaattgagttttttatttatgggatttagatgataattgaaatatatatatttttgtttacgtttttttttttgttgttttttattaggataaaattaaagggatttttaggaggagagtgtgttattttttaggggaaaaaagaagtttttagtgttttagtttttgttaggttgaagagataaagttgtgtttattttgaaaagttttttagtgcgtggtgttatttgttttggagaatatattagtttttgtttttgtattgtattattttttatattatattttttatttttattttattttttagtttttaagttatgaggtttagtcgttgttgggagaatggtgaagaggagttatagaataggtggataaatttagtggatgaattgtatttattttttttttagatagagatttggtttttaagattttttagagcgggtttgtgttggttatttttttatagaaggaagtgtgtggaggaagttgaagttgttgtggttttagacgtaggtaggttatttttgatgtttttaataagaggcgtgtagtgtatcgtaggatatttgttaagggttattttagaggtttatttttggaagttatagaaatcgaaaagatttaagtattcgttaatttaataagttatttttttaaaaatgttttgatttttttattagtaaaattagtaatggggtttgatttagttttgggattttagagtgaaattttaataataaagtaaatgtttattagggtgtttttataggggtatatttattgggaattgtttttttggaataaagaataagtaagttcggggagtagttggttttgagaatttgatttgttgagatgagatgaagtaattattattagggagcgttaagttgttttgtagtttttttatggttgtttaagtatatagggattatgtgttttagttggttgttttttaaaaataagtttttattatttaagtggatagaaggagtgataggaagtgtagagggaagtgtgttttttgttgaagttgggtggagtttttagaagtaattaataagaaagagtttttattaagttattgagttataaggatttggtattgatagtgggtagaattgtaatttgtcggatttatgtgtatatttagagtttttttttagtattttttgggtttttagagatattttttattttttgtttttttgtaagttttttttaagaaggttatgggagtttttaagatgaggagtgtgggggtttttttttttttaggtatatgttatttttttttttttggtgtgattttggattttttagatttttagggtttttattttttttaatggaatatatttggtgaggtttttttaaaatatttttgtttttaaatttattttaaattggtttcgttttttaaaagtttataattttaagtatatattaagtagcgtatgatttttatggttttttgtgggatagtgtttgttttggatatagtattggtttaggtagaaagtttgggttggtggtttttaattttgattgtaaatgagaattgtttgtaggaatttttttagagatgttaaagttttgttttttagtgattttaatttagtggtttataattataattttgttattgttatttcggatttttaggtaaatttttaagttttttttattgagatagggtttttttttgttatttaggtaggagtgtaatggtgtaattgtagttttgattttttgggtttaagtgatttattggttttagttttataagttattatatttagttaattttttttagagatagtgttttattatgttgtttaggttggttttaaatttttgggtttaagtagtttttttgtttcggttttttagagttgggattataggtatgagttattgtattcggttaaatttttaagttttttgattatttgtttttttgtttgtgggatttgggtagataattattttttttattttatacggtgatggttagggttagaagagtttatttattattagtgtcgggtaaagtgtagtgaaaattttaagattattgttgttttgcgttgttttatttttttttttatttagtttttatttttaatattttttatttttattaattttatattttaaagtatgaaatatttgtagttttgagattttagtttgtttttgttttttcgaggtatttaattataaatttgaaagattatttagttttattttatgtttttaggaagattcgtttttgatttatataaatagatgagatttattttggttttaaaatttgtttatagatgtttagtattttttcgataattgtgttttattttatttttgtagtgttagtttaatgtagggtaacggggttttgttttgggtttttttgtaggtggtattagggaaggtagagaagggaagataatgtttgtcgttttcgtggttattttattgttgttgtttttgtttttggagttgtttttattagtattgttttttttttttttatattattgttagggtttgagtgagatttatttttaaggatttatttaggtagttatatcggtggtttgaaataatttttattttgtaaatatttgtgtttaaaatagatgaattttgtttataatttatatatggattcgagatatagtatacgaagtttattcgttatagggagatagtggaggtttaggagtaggtggcgtgtttggggttggatggagttttaagatagtaggtgtagaggtggtgacgagtaaataggttagtagagtttggttaatagtttgggttttaagatatgttttaggttattaaaagtttagggtgagcgtagttgtattttaaaattttaattttttttttgtttttatatttttttttagttatggtttttgtggatagggtttattagtttatagaattttgattttatgtttttttttttagaatttttagggtatagtataaatatagttttttttttttgagggggttaggagagaaagataatgaatggtattttgtttgatttttagggaaagttgaaatattggtttatagattggagttattgtttaatataattttttaagtttttggttgaagatagatttgagggttggtattatttatttttttagttttagtgtgatgtggtataggttttgatatttaaggagttttatttttaaggaagtaattttagtttagttatagttttattttagagttagttgttttttttttttattagttagtgatttataattttttgtttttttttgttttttattatttaagttatattttgtttttaagttttgagttatttttttttgttgtttttttggtttggtaagttaggaggaaaggtttgatggttttttttttatttttttttggaggagtaaggaagtgaggtttttattttttatatatgagtgttttggattttggtttttagttgatgaatatttaatatttagttttttgttttggttgtagttacgtagtgtagttaatgtgtggtttaagaatgattttttttttaggtttcgtttattttgggacggtgggtaggaattttagtagaattggtaaattatttgtttcgtttttaaagggttttttacgagttatttttgggttatatggggttaaagaaattttttgaatatagtattttggaggaaggagtttttttttttttatttgtagttatagtgtggttggtaaatttttaagtttattaggaggtagagggtaagatgagcgttttgttttaaaggttaaagagaatagtattaagcgtttttatttagggttttttttttttttttttatgaagtttttgttttttttttataaattttgggttttaggagaattttggttgttgaaggttaggtttagtttttcgtttgggagtttgaggaaatgttttttttatttaagaaatggaagatggggtttaggaggttttgttgttgttatatttttttttgttgtgtaaattgttgtttttggttagtttttttttgtttttaatttgatatataggagttagttttttatttttaaatgtttttttttgtggagtgtatggttggtttgatagtgttattgattttagggttttttttgtttttggagtatttataggttttggtttatatttttaaatttgggagttaggtggagagaaattgtgtttatgttgtatgggaggtagagaatggaggtgattttttatttttgttattttttattttgtttttttttttgaagtatttgtttttgagtttagttttttaaagaggtaggcgggtagttaagtaagggtaaagttttggtcggggaatgggtagaggtagggtagttttaggttcgaggattttttggttgtcgttttttttttatttcgatgttttattttcgtaggttattggggaggtaggtttatggtatatgagggatagtgggggtgggggaagaggaagaagtatt

SEQ ID NO: 153 - DNA, 9983 bp, Artificial Sequence
  chemically treated genomic DNA (Homo sapiens)
ttaagtttagattttatagagttaattataattttgtgttagttttttaagagtatatagttgaaattagtgttatttaatagagatataatgtgagttatatgtaattttatattttttagtggttatattttaaaaattaaaaagaaataggtaaaattaattttaagtatatgttttttttaatttaatatattattatttttttatttttattttcgagatagagttttattttgttatttaggttggagtgtagtggtataattattatttattgtagttttaattttttgggttttagtgatttgtttagttaattttgaaaatttttgtagagatgtggttttattatgttgtttaggttggttttaaatttttgggtttaagttatttttttattttagttttttaaagcgttgggattataggcgtgagttattatgtttagttaatttattatattaaaaatatatttaaaatatttttatatgtaattttattaaattaagatattttatatttttttattatattaagtttttagaaaatattgtgtgttttatatttatagtatagattagtttgtattagttttattttaagcgtgtaatagttatatacgtttatggtttgtttgttatattggtttagaggttaatggtaagggttttggagatagtatatgcggaggttaaagatattttgtttaggatgttgatttaattatgttgatttttgattaattttagttttaggaaagtcgttaaggtttttagtttatttatttttttttgtgtaagagtatgtttttaatataaatattttttttaggtgaaaataaatttaatatttttatattttagttggtttatatatttttttaatagggaaatcgttttttttttatgttatataagttttgggttgaggaggggtaatagtttggggatttattattttattttatagttatttaagatttttgtggtttttgtttttaagtttttaataaatgtttttttttgagaaattgggtatgttagtttttttttttagttttttagttttttttgattggttggcgcgggggtggggtaggtttatagagatttgtttatagtagaatagtatgtgtgggttagaatttcggttttgtgatttattaattgtataattttaagtaaagttgtttaatttttttatgtattagtttttttatttataaaatggggataataatgttggttattttaagaggttgtagagattaattaatttaaggtagtatttggtatagataggatattgagtgaatgttggttgttattttttttatgttaaagtttggtttatggagattaatttgtttaatatttcgttttataaatgagaaaattgtagtttagagtttggaaggtattagttttataagtaaaaattatagttatttatttttttttttgatgaattttttgttttttggttggttttgagattaaatttgttaattatttaggaaattggtagttttagggttttagttcggttttgtaatttttttcgattgtaaaataagggttattgtttgaagttggtattgaagtgacgtaggttgggttttatttttgtttttatttaggtttattagttagagtggttgattttatttttgagtttagaatttgaaatgtttattaattaataataaggttggttttcgttgttttaattttttataattttttgagtttattaatttgtgttttattttttttgaagatatagtgtattagtattttttgtaaaatttttttttaagttattttcggtttttgtttatttattaagtaggtaagtagtgagttttttatagaggtttttaaaaaataggatgaagaggtttcgagtgtttatttgtttggaatgcggaagacgtgtttttagattggaagtaaaattagtttatgatttttttatagtttttttttttatttttttttttttattttggttaatgtaaattatttatttttttttgataagtttatttattataattcgtacgttttgaatttttttagaagatgaaattagattagttttgcgggttttatatggttataatttgttaatttgaagttttttttattttatatgttaaatattgttttttttgatattaatttatttgatagatatgtattaagtaattattatgtattaagttttgtgttggtgttggtgtttttttggattttataatttagtgtagaaaatagataaataagaaatgatgataaagtataataaagggtcgatgtataaagtgttaaatattttaggaattataggaaaataagggaattattacgaaatttttgttttaagacgtgatattagtggagatatgaaaaatgagtaggatagtattagttaaagggagataatttttgttttaagtatagggaatagtagagatgaaatttggaagtgagggagaatggtagattgtaagaacggaaaaatgtttagtgtagcggaggtagagagaatatggagagtgtggtaaaagaggaagaagtagatggattttgagggtattttttgaagtgttaaggaatttagattttaatttgagggtaattagaagtagtttggtggagaacgatatattttaaaatatagggtttttgaaaataagttaattaaatgtatttaaaaggttgttgatgaaaagattgggaagtattgtttttatttttattgtttttattgttatgttttttgtgttaatggttagattttttttgaaagtttattgtagtatgaaagttttttttaatgttagggtaggttttttaagtttttttattttattgtttatgttattagttttgtatttttgttttgtatggtttaggttttttttatatttttaggaatgaaaagttatagatattattattgagagattgttaaagatttttgttaaataggtggataattgagattagagaaggaaagtaattttattatttttcgtagtaatttaggggtagtattttaggtttttggtttttttttgttttttttaaagaaatagattattagggttgggattaaggtgagataagtgagatatagagggtgtaaaatgtagagagatgttcgttgttaggtgttagtttgtatttgtgtgattttaggtgttttttttttttttattttgttggtatttgttggaaatatttttgagagtaggattttggtttttagataattttttagtattttttatggtgttaatatgttgttaggtgtttattttgagggttattagatgtttattgatattaatgaataatggatttttgataaattgatgtgtatatagatgtttatattttagggtaaatacgaattttaaaagataatagaataatatggagagggtttgagattgagtttagagatttggattttggttttttttttgttattagttggttatgggaatttggataaattgttttttatttttaggttttagggaaatgaggtggttgaataaaacgtattgagtatttattgtgtgttagttattgtttatatgtttttaggttttaatttagttaaagattttttggtttttgtggttttttttattttaataggttgtggtttgaggtgggaagatttcgtagagaatgtaaaatttgagagatattttttaaatttttagggggatgttaatatttttaattatagtaaaggtatggttttttaaggtattttttggttagaagaaagttttagaaggtatttaattttaggatttatattattaaggttatagttaggttaattgttttataataattttagaatatgtttgaagatagatttttagtttttgtttttagagattttaatgtagtgattttaaagtggggtttaggaatttgtattaaaggttttttagttgattttggtggttagagagatttgagattgattttattatattttttatttgtgaacgggattatatttagatagtttagttttagaattgtttggtttgattttaagtgttttatggagattttgtttttttaatgtaatgaatgattaagttagtaaatattttatattttttgtgtgttaggttttgtgttaggtggtgattatgggttttatttttaaaggatttttggttttcgtttgttatttattttagaaataagttatttagttagagttagaagggtattggagattattaattaattttattattatatagttgaggaaattgaggtttagagagtaattgtaatatgttaaagattatatagggagtaaatttattttttgtttttaagttaggtggtttggttatagataggttaagaagaatacgaatagataagttttgttgggttttttatttagtttattattattagattattttttttttttttatttatatttttgcgtatttttatggtttttatagaatttaagtttaaaaatagagttttttttgagtttttgggtttttatttttgaagatttttatgttatagaaaattttaattaaataaatcgttatgttttttttttgttaatttttttttataggtatgttagttgtgatttttatgatggggaggaaaggtattttattttttttgtttttatagttttaatgttttatttagaatggggtttttaaaattttaggatatttattttttgttttttaagtattaaatttatatatagtaaatgtttttggaagtttaattttagtttttgttgaaattttaaatttttaatttttagaggattatcgttaggtgtttttaaaatttcgataggaataagaaatgttttttagaatggagatttttattagttttagggagttattagtttttttgttttggttgtaatggagatcgttgtgtttgttttttttcgtattttggagttaaaagaggaagggatcgttttttacgtttatagggatttgatttttatttttttgtttagatttgtttatgttattgtcgtttcgggacggggaggtggggagttgagggtaagtcgcgttcgtttttgaaattttagtcgtttagcgattggttgtaagggtttcggtttggtcgcggattggttatattcgagggtttgaaaggtggttgggagcgtcggatattttagacggacggtggttagggattaggtagcggtttaggcgattttgagtgtgtttttatttcgttatggttcggttgttgtaggcgttttgtttgttttttttgtttttggtcggtttcgtttcgtagagtcggggataagagaagtcgaaggtgagtgagttttcgggtcgggggtcgggagaaaaaatttagtttttcggtgtttagcgtttagtgtaatgtatttttttttttaggtttttcgttagatgggtaatttttaggtgcgagagattttttgaattttttttgtcgtttttttcgtcgtcgggatttcgttttcgatcgtcgtcgtttcgtagttttatttgttggagagtcgagatttggtgttttaggcgggtagaatgattaagggaggaaggttttttttttcgagttcgtattttttttttattgttatttcgagggtcgttttgttatatttatgttattttcgtgtttgagttgtttttttttagtagggtttaagagggagggcgttatagaaaaaaatgtttagcgtttgggtgggttgtgtaagtttttagggagagagataaggagaaaggagagaggtagttgggtggttttggttttgaagaattgttgtggggggtttttttattttaagaatgatataggtaggtagaaatggttatttggatttagggtattggtagaagaggtagagatttgtgttagaaagagttttggagtgatagtgtagaatatttaggattttgagtttttatttgtttttggattttcgtttttttatttgtaggggagagtttgggggtgggagtgtatggggtataatgaagttgagggttttagaggggatgtttggagaagttgaaaaatttataagttgttttttgaaatttttttttttggggtagttttattatttaggatttattgtttttattagtttgaggaaatttggtagttggagaaagttggggattgttaatttagaagaagaggtagaattttttagagttttagtttatttttagtaggtgtgtggtttatatttggagtggggatattgaggttaggagtgggatgatttagtatgtttattttttttgatagtatgtattggggtgggttttgtagattttttttttatttagggagtgggagtgggtggggaaggaggtagaagttaggtgtagggatagatttaaagcgagcgatttttgtttttaattttttaatatgtataatttatatttttgtaagttttgagtttttgtttttaaaattttttgggtttttattttaattaagtttttatgagtttaggatttcgtttttaaaattttgtttattttttaggaagtttattggaagtatagggttttttttatgttatttattttttttcggtttttagtttaaattcgattaattagtttttttttggagttagtttaaatggatgtgaagttatttcgtttaagtttttttttttttatttatttttgtttataatttttaatttagaaggtattttttaggttaggaatgggatcgatttttaatattgaggtttggggtgggttatagataggttagtatcgtggagttagttttaatttttagttttggaaaggttaaagaagatataattgggttttgttttaagaaggttagtggggagaacgtggattttatgaataatttattatagttgtgttttttttgtagtattttggggaaggataaatggatttagagagaataggatggggatggtttagaaaagttttagggtgaggtgtgattatattatatataattagttaggatttgttggttaatgaaagtttgggtatgtttatttttgtttttaagtttttagagtttagatgttttagttttgggttaggatttaattatttattttatttttaattttagggtaaagagatagggttatggggtatgtggagaatggaatggacgaaaggtgatttagttttagagaggtgttttttttttattaattgaaagggagatgttagggaagagattaggtttttttttttttgttgcgttatttttttagtttaattttaggttgtttacgttttttgtttttataaaaggattgtagaagtcggaaagagtgataattgttgacgtgtacgggattttagtaattgttggtttttaggtgattaaatttggtagagagaattatggaattataggttgatagagttaaagggtttttaagatagttttgaatttgattttattttataatggaggagttggagttttagtaaagggggttatatggtattagagatatagtaaagtttagtatttaggttttttgatttttagattattttttatagtattatattgataggagtaataagacgggagaggagaaagatataagattagtagttttagttagttagagttttggttgagttttattatttaatttttaagttattggaattttttttttttgttcggttgtgggaggatttaggtatttttatggtttttttttttattttttttggttattgttttagatgcggtgttttgggattttacgtgtttagagaagggaagggggtttatagaggattgagttgtagtgattagtggtgagtatagtcgtggttttttatttatgggttattttttgatttttattattttttgatatgagatttcgttttaagagattttaggtttgttttgttttgttagtagatttttataattattttgggtagtagtatgtttatttttttggatatatgtttagatagtgtaagtgatttgtttagggttatatagttagtaaaaaatagaatttaatgaaatagggttttttttgttatatttttaagttgaaattgtgtttagaagttggtttttttgtttataagtttttattattaggataatttgtaattttttttttttttatgttttagagtttatttttggattatggtagagttaaaaaagtggagaggttatagatatgtttggttttttggttattagatttttgtggcggtttagggtgtatttgttgtgttttagtttgtttgtattttaaggcggaattggttttggttgggaacgaggaggtttaggagtagtaggaatgttgattttaggttttgggtttgtttttagtatttattaaaagttatcggatgtggaatattagatttatgtaaagtaggaagtttgtattagagttaagaagagagtttgtagttgttagggaatggtttggcggaggaagcgtagtttcgtttagtttagtagatttgttttatgatagaggtagtttttttgtattttattggggttacgttttgttagtatatattattttttttatttggttaggtttaggtattttgttttaatagtaagttttttagaattgaggggaagagagggagtgaatttgtttttttaattttagttatttgtttttgtttttttttggtttataatgttattttgtattttatttgtttattgtttgtttattttttaaaggatattagggttataaaggattttaaagattattttatataatggttttaaggtttttttttttttattacgattagtttatttgttaaattgtgttaatgatgtaatgatatttttttaagaatagttttagaattttgttgtttgtgttacgggtagagtaggtttataggttatattttattagttagtagtgattttaatttttttttttttattgattatgattttattaagttattatggttgatttggttggagagttggtttagtttaaggtttttattttataaatgaggaaatttaggttcgaagaaaagaaagggttagtttaagattatatagggagttaatggtaaagggatatggagtttaggttttttagtttatagtttattgtattttgtttttttttgttttggaggttgattgtgagtagtagttggggagggaggaaggtataagggttattattagtttgtttagattcggaatattaatatatgtaggtattgttgtttttttttattttattatagtttttttttttatgtttggtttttagttttgtttttttatttggtaataatagttttattttttttgttttgtagattgggagtttttgaattattatgtttatacggttttttttttttttttgtttagttttttttttatattggtttagtttaggtttttatttttaattgtttggattattttaatagttatttaattagtttttattagttcgtttaggaatttagttattagttttagggtagtttttttgagagtttagtaaatgttttgaaattgatatgtgatgtggaagtaattagtaaaataagttattttttagggttttatagtatttatttattaagtgtttaatattaataagtgtttattaggtgtttaatattaataagtgttttttaagtatttaatattaagtattcgaaaagtatttattaagtgtttttataattattattttaaataaggaattaggagacgttagtgttagtttagttttaattttcggtgattattttgagaaagttattttttttgttgggattttttatttttttgaaaacggagatgtttaagtttttttttagttttaattgttttttttatggtttgtgttttaga

SEQ ID NO: 154 - DNA, 9983 bp, Artificial Sequence
  chemically treated genomic DNA (Homo sapiens)
tttggaatataggttataaaaggagtagttagagttggaaaggaatttggatattttcgtttttaaaagaatgaaagattttaatagagagagtgatttttttaaagtaattatcgagaattggaattggattagtattgacgttttttaattttttgtttaagataatgattatgaaagtatttaataagtgtttttcgggtatttaatattaagtgtttaaaaagtatttattaatattaagtatttaataagtatttattaatattaagtatttaataagtgagtgttatggaattttggagaatgatttattttgttaattatttttatattatatgttaattttagaatatttattgggtttttagggagattgttttaaagttgatgattgggtttttagacgggttgatggagattggttgggtggttgttggaataatttaggtaattgaggatgagaatttgaattaggttagtgtgaaggaaaaattgaatagaaaggaggaagaggtcgtatggatatggtgatttagaggtttttaatttgtaggataggaaagatgaagttgttgttattaaatagggaagtaggattgagagttaggtatgggggaaagggttgtggtgaggtagggaaaagtaatagtatttgtatgtgttaatgtttcgggtttgagtaggttggtgatgatttttatgtttttttttttttttagttgttgtttatagttagtttttaggataaggagggatagagtgtagtggattgtgggttgggagatttgggttttatgtttttttgttattaattttttgtgtggttttggattggttttttttttttttcggatttgagtttttttatttataaaatgagaattttgaattgaattaattttttaattaggttaattatgatggtttgataggattatgattagtgggagagaggggattggggttattgttggttagtaggatgtggtttatgagtttattttgttcgtgatatagataataaaattttgagattatttttgaaaggatgttattgtattattgatataatttggtaggtgggttggtcgtgatgggaaaggagaaattttgaaattattgtataaggtggtttttaaggttttttgtggttttgatattttttgagaggtgggtagataataaataaatggaatgtaaagtagtattatagattaggagagggtagagataggtggttggagttagagaagtaaatttatttttttttttttttttaattttggagaatttgttgttgaggtaaggtatttgggtttgattaggtgaagggagtgatatatgttggtagggcgtggttttagtagagtgtagaagagttgtttttgttatgaagtaggtttgttgagttgggcgaggttgcgtttttttcgttaggttattttttggtagttgtaagttttttttttggttttggtgtaaattttttgttttatatgagtttaatattttatattcggtgatttttggtgggtgttggaggtaggtttaagatttaagattaatatttttattgtttttggattttttcgtttttagttagggttagtttcgttttaaaatgtagataaattggggtataataaatatattttagatcgttataaagatttagtggttagaaagttaggtatgtttatagtttttttatttttttaattttgttatgatttaaaaatgaattttgagatatggaggaaaaaaagattataggttgttttaataatgggaatttgtaaatagaaggattagtttttgggtatagttttagtttgggggtgtggtaaggagaattttattttattaggttttattttttgttggttgtgtggttttgagtaagttatttatattgtttgggtatatgtttagggagataagtatgttgttgtttaaaatggttgtgggaatttgttggtagagtaaaataggtttggagttttttggaacgaaattttatgttaagggatagtgggggttagaaggtggtttatgggtggagagttacggttgtgtttattattgattattgtaatttagttttttatgagttttttttttttttttgggtacgtggaattttagagtatcgtatttgaaatagtggttagaggagataaggggagaggttatgagggtgtttgaatttttttatagtcgggtaagagaagagggttttaatggtttgagagttggatgatgggatttagttaggattttggttggttggggttgttggttttgtgttttttttttttttcgttttattatttttattaatatgatgttgtgagaagtggtttgggagttaggagatttgagtgttgggttttgttgtgtttttgatgttatgtgattttttttgttggggttttagtttttttattgtaagatggagttaggtttagggttgttttaagggttttttaattttgttagtttgtggttttatgattttttttgttaggtttagttatttagaaattagtagttattaggatttcgtgtacgttagtagttgttatttttttcggtttttgtagtttttttgtagagataaggagcgtgggtagtttgaagttggattggggaggtgacgtagtaagaagaggaggatttggttttttttttagtattttttttttaattggtaggaggaaaatatttttttggggttgagttatttttcgtttattttattttttatatgttttataattttatttttttattttggggttgggggtaaggtgagtggttgggttttaatttagagttaagatatttgaattttaagaatttgggagtagagatgggtatgtttaggtttttattagttagtaagttttgattggttgtatgtgatatgattatattttattttaaaatttttttagattatttttattttattttttttgagtttatttatttttttttagagtgttgtagagaagatatagttatgatgagttatttatggagtttacgttttttttattagtttttttgaggtagggtttaattgtattttttttgatttttttaaaattgaaggttgggattgattttacggtgttggtttgtttatggtttattttaaattttaatgttgaaaatcgattttatttttgatttggaaaatgttttttgagttggggattatgaatagggatggataaaaaggaggggatttggacgaagtggttttatatttatttagattgattttaaggagaggttgattaatcggatttaggttgaggatcgaaaaggggtgagtaatatggaaggaattttgtgtttttaatgggttttttgagaagtggatagaattttggaaacggaattttagatttataagaatttaattaaagtgaagatttagaggattttagaaataaaagtttagagtttgtaaaaatgtgagttatgtatgttgggaagttggagatagaaatcgttcgttttgagtttatttttatatttggtttttgtttttttttttatttatttttattttttgggtagaggagaggtttatagagtttattttagtatatattgttaaaggagataagtatgttgggttattttatttttggttttagtatttttattttaggtgtgggttatatatttgttggaaatagattgaggttttagagaattttatttttttttttgaattagtagtttttagttttttttaattattaggtttttttaggttaatgaggatagtgggttttgggtagtgaggttgttttaggggaggaaattttagagaatagtttgtggattttttagtttttttaagtattttttttgaggtttttagttttattgtgttttatgtatttttatttttaaatttttttttgtagatggagaaacgggggtttaggagtaggtaaggatttagggttttgagtgttttgtattgttattttagagttttttttagtatagatttttgttttttttattaatgttttgaatttaagtggttatttttatttgtttgtattatttttggggtagaagagttttttatagtagttttttaggattaggattatttagttgttttttttttttttttttgtttttttttttgggaatttgtatagtttatttagacgttgggtatttttttttgtgacgtttttttttttaggttttattgaaggggagtagtttaggtacggaggtgatatagatgtagtaaggcgattttcgaggtggtagtggggagaaagtgcgagttcggggagagagattttttttttttagttattttgttcgtttgaagtattaggtttcggttttttaatagatggaattacgagacgacgacggtcgggggcggggtttcggcggcggagggggcggtaaaaggggtttaggaggtttttcgtatttggggattgtttatttggcggggagtttgggaaaaggggtgtattgtattgagcgttggatatcgaggggttaggttttttttttcggttttcggttcggaggtttatttattttcgattttttttgttttcggttttgcgagacgaagtcggttaggagtagggaaagtaggtaggacgtttgtagtagtcgggttatggcggggtgggggtatatttagggtcgtttgagtcgttgtttgatttttggttatcgttcgtttgaggtgttcggcgtttttagttattttttaagttttcgggtgtgattaattcgcggttaagtcgagatttttgtagttaatcgttaggcggttgggattttaggggcgggcgcgatttgtttttagttttttattttttcgtttcggggcgatagtgatataagtaaatttgggtagagaggtggaagttaggtttttgtggacgtgggaggcggttttttttttttttggttttaaagtgcgaaaggaggtagatatagcggtttttattatagttagggtaagggggttaatagttttttagaattgatggaagtttttattttgggaagtattttttatttttatcgaggttttaaaaatatttggcgatggttttttggaaattgagggtttaaaattttagtaagagttgaagttaaatttttagaaatatttattatatataggtttagtgtttaagaaataaagagtgggtgttttgggattttgaaaattttattttgggtagggtattaggattgtagggatagagaaggtggggtgttttttttttttattataaggattatagttgatatgtttgtagaaaaaggttagtaagagaaaagtataacgatttatttaattaaagttttttgtgatatgagagtttttagaaatgaagatttaaagatttaaggaaaattttatttttaggtttagattttatgaagattatggaaatgcgtagaaatgtgagtggggaaaaagggaatggtttaatagtaataaattgagtgggaaatttagtaaggtttgtttgttcgtattttttttggtttatttgtggttaaattatttggtttagaagtagaaaataaatttgttttttgtgtagtttttaatatgttgtagttattttttgggttttagtttttttagttatgtaatgatgggattgattagtgatttttagtgtttttttggttttggttagatgatttgtttttaaagtaagtgatagacggagattaggagttttttgagaatagggtttataattattatttggtatagggtttagtatataagagatgtaaagtatttgttgatttaattatttattatattaaaaaaataaaatttttatggaatatttaggattagattaggtagttttagggttgggttgtttaggtatgatttcgtttatagatggggaatgtgatggaattagttttaaatttttttgattattagagttaattgggaagtttttaatatagatttttggattttattttggaattattgtattagaatttttaggggtagaagttgaaaatttgtttttagatatgttttaaggttattgtgaggtagttggtttggttgtagttttggtagtgtgagttttaggattaagtgttttttggaatttttttttgattaagaaatgttttgagaaattatatttttattatgattaaaggtattaatatttttttgggaatttggaagatgttttttaagttttgtattttttacgaagtttttttattttaaattatagtttgttgaagtggaaggaattatagaggttaggaagtttttagttgagttaaagtttgggagtatatgaataatggttgatatatagtaagtgtttaatacgttttatttaattattttatttttttgaagtttagagatgaggagtaatttatttaagtttttataattaattgatggtagggagggaattagaatttaggtttttagatttagttttaggttttttttatgttgttttgttgttttttaaggttcgtatttattttaaaatataaatatttgtgtgtatattagtttgttagaaatttattgtttattagtattagtaggtatttagtgatttttaaaataggtatttagtaatatgttaatattatgagagatgttaaagagttgtttaaaagttaaagttttgtttttaaaggtgtttttagtagatattagtagggtgagggaagggaaggtatttagggttatataagtgtaggttggtatttggtagcgggtatttttttatattttgtattttttatgttttatttgttttattttaattttagttttggtggtttatttttttaggggagataagaaggagttagagatttgagatgttatttttggattgttacggaaagtaataaaattattttttttttttgattttagttgtttatttatttaataaggatttttgatagttttttagtggtggtgtttgtggttttttatttttaagagtataaggaaagtttgagttatataaaataggagtataaaattgatgatatggatagtggggtggggaggtttggggagtttgttttggtattaagaagggtttttatgttgtagtgagtttttaaaggaggtttaattattggtataaagagtatgatagtgaaaataatgagaatgaaaataatattttttaatttttttattagtagttttttaaatatatttggttgatttgtttttaaggattttatgttttgaaatatatcgttttttattaggttgtttttgattgtttttaggttaaagtttaaattttttagtattttagaaagtgtttttaaaatttatttgttttttttttttttgttatattttttatattttttttgttttcgttatattggatattttttcgtttttgtagtttgttatttttttttatttttaggttttatttttgttgttttttgtgtttggaatagaggttgtttttttttaattggtattattttatttattttttatatttttattaatgttacgttttaagataggggtttcgtgatggtttttttgtttttttgtagtttttagagtatttgatattttgtatatcgattttttgttgtattttattattattttttgtttgtttattttttgtattaaattataagatttaaaaaggtattagtattagtatagagtttaatatatagtagttgtttgatatatatttattaaataaattaatgttaaggaaaataatatttggtatatagaataaggagagttttaagttagtaagttgtaattatgtagagttcgtaagattggtttgattttattttttaggaagatttaagacgtgcgggttatgatgagtaggtttgttagaggagagtagatgatttgtattggttaaaatgggaagggagggatggaaggagaagttgtagaagaattataagttagttttgtttttagtttgagaatacgtttttcgtattttagataagtgagtattcggaatttttttattttattttttagagatttttatagggagtttattatttatttatttggtaggtgaatagagatcgaagatgatttaaaaagaggttttataaaaagtgttgatgtattgtgtttttaaggaagatagaatataaattaataaatttaaaggattgtaaaaagttaaaataacgaaagttagttttattattggttagtaaatattttaggttttgaatttaaagatgggattagttattttaattgatgagtttaggtggaagtagaagtgaggtttagtttgcgttattttagtgttaattttaaatagtagtttttgttttgtaatcgagagaaattgtagaatcgagttggggttttggagttgttaattttttaaataattggtaaatttgattttagggttagttagaagatagggagtttattaagaggagaggtgggtggttgtagtttttgtttgtgaaattagtgttttttaaattttgggttgtagtttttttatttatggaacgaggtgttagataagttgatttttatgggttaagttttagtataaagagagtagtagttagtatttatttaatattttatttatattaggtgttgttttagattaattaatttttgtaattttttgaggtagttaatattattatttttattttgtaaatgaagaaattaatatatagagaggttaagtaattttgtttaaggttatgtagttggtaagttatagaatcgggattttgatttatatatattattttgttgtgagtagatttttgtaaatttattttattttcgcgttagttagttagaggaggttgagaagttgaagaaagaagttgatatatttagttttttagaaagaaatatttattagggatttagaaatagaagttatagaagttttaggtggttgtgaagtgagatagtggatttttaagttattatttttttttagtttagggtttatatagtatagggaaggggcgatttttttattgaagggatgtgtaggttaattgaagtgtgagaatattaagtttgtttttatttaaggggaatatttatgttaaggatatgtttttatataaggaagagtagataaattgaaaattttagcggtttttttggaattggagttaattagaaattaatatggttgaattagtattttagatagagtgtttttagttttcgtatatattgtttttagagtttttgttattaatttttaagttaatatagtaggtaggttatgggcgtgtgtggttgttgtacgtttggagtagggttagtataaattgatttgtgttgtgagtataaaatatatagtgttttttgaagatttagtgtgataaaagaatataaaatattttaatttaataaaattgtatatggaaatattttaaatatatttttaatatagtgggttagttgagtataatggtttacgtttgtaattttagcgttttgggaggttgaggtaagaggatggtttgagtttaggagtttgagattagtttgggtaatatagtgagattatatttttataaaaatttttaaaattagttgggtaaattattggagtttaggagattgaggttgtagtgagtggtgattgtattattgtattttagtttgggtgatagagtgagattttgtttcgaaaataaaaataaaagaataataatatattgggttgaagaaaatatgtgtttaaaattagttttgtttgtttttttttggtttttaaaatatagttattagaaaatgtaaaattatatgtgatttatattatatttttgttggatagtattggttttagttgtatatttttaagggattggtataagattatgattgattttgtgaaatttaggtttaa

SEQ ID NO: 155 - DNA, 8899 bp, Artificial Sequence
  chemically treated genomic DNA (Homo sapiens)
ttggtttaggtttgtgttaggggttggaagatagaggaattttattttgaatggttaaagtagtggtttttagttaggtggggagatggttttataaataatagtatgaggtagggtgatattattgttaaaaagagatagtagttatgtgtatagatgtagattatgtgtgatgtagattttggggttgatagagatgttttaattaaaaggtatagtttagtggttgggtgcggtggttttcgtttgtaattttagtattttgggaggttgaggcgggtggattataaggttaggagatcgagattattttggttaatacggtgaaattttatttttattaaaaatagaaaaaattaggcgggcgtggtggtaggcgtttgtagttttagttattcgggaggttgaggtaggagaatggtatgaatacgggaggcggagtttgtagtgagttaagatggcgttattgtattttagtttgggttataaagtaagattttattttaaaaaaataaaaataaaaaaaatttatagtttagatttggagagaggttttcgtagggagaaaggtaagatataaaattaagggattggtttttatttatagtgaagtatatttttgtatatttttttttatttaatttagatttaaatgtttttataaattttaagaatagaggatgaaattgatttaatagttagttttgggaagtttgagtttatggtatgttttaaggtatatatgtgggaatattatggttgatattgttgttgtgatttttggtaagttaggatatttttttaagttttttttttttcggttgtaaaatggaggttataaagatattgatgtgatagggaggtaagggaaagtgagataacgattgtaaagttattagttaagtatttgatatttagcgattagattaataaagggtagttattgttaggaaaaaatagattttattttgaaagtgaggaaagttaggcgcggtggtttatatttgtaattttagtattttgggaggttgaggtaggtagattacgaggttaggagttcgagattagtttggatagtaaggtgaaattttgtttttattaaaaatataaaaaattagttgggtatggtggtatgtgtttgtaattttagttattcgggagattgaggtaggagaattgtttgaattcgggaggtagaggttgtagtgagttaagatcgtgttattgtattttagtttgggtgatagagagagattttattttaaaaaaaaaaaaaagaaagaaagaaaaaaaataaaatgaggaaagtgggattcggagaggtgagatgatttttgtatagttaggatttaaatttaggtttgagatattagaggtttagggtaaattatttttttttgtttcggaatttttagtaggttttttatagtttattatatggattttatttttgttagggagtgaggatttagtaaaggtttggggttaaaaagattttgggtaagttttttaattttatgtgttttgatttgagatttttaagtgagtttgagaaggtttgtgaatttttttacgtagttgatgtaaaattttatattaatggattttagacgagtttatagttttaaaagtaataaattatagatttgatttgatttagtatggttttttatttatttaatggagatacgatttttattttgaaaggttgtgaagggattaaatgaggtaatttgtgagaagtatttgaaatatttttagtttttattaaatgttggtttttttttttttttttttttttaaattatttttattagttagtaaatattattgagtatttgttacgtggtaggtattagttaggttttgggggtaaagtggtgaataagatagatatggtttatttttatggggtttatattttagtagagggaaatagtaaataaataaaagtaataattttagatatgaataattgttatgaagaaaatataaggtcgggtacggtggtttacgtttgtaattttagtattttgagaggtagaggcggacggattataaggttaggagtttgagattagtttgattaatatggtgaaattttgttttttttaaaaatataaaaattagtcgggtatggtggtacgtgtttgtaattttagttatttaggagattgaggtaggagaattgtttgaatttaggagatagaggttgtagtgagttaagatcgtattattgtattttagtttgggtaatagagtgagattttattttaaaaaaaagaaaaggataacgtgatagatttatagggtggggtagtttttagggatgaaatatttgaatgattaaaggagttagttatgttaggattttggaggaaagtatttaggtagagagtgtagaaagggtaaacgttttttggaaagatttttagttaagagttttttatttttagttttattataaattgggttattttgaataagttacgtaatttttgaggtttagttgttatatttataaaatgggaataaagatattttatttgttatattgtgagaggttttaattaaagggttgttaaggtttgggattttttttaaattttattatagatatttgatatttattatttggtattcgttttggaagaggggaatttgtatagagaattttgggttatgtttttgatttttaattttatgttgtattagaaatagttttttttgtttttggttgatttaggagtttttttttgttatttggggtttattttagttaatagttgtttatttttttaggtataaaagttaacgaggaaaggatattaggaaatattgttttgggaataattagatatttatttgttattatttttttttatttcgtgattatatacgggagattggaggatttagtttgttttgtagttagataatgtatatggtttatttaaagagttaaaaggggtcgggcgtagtggttaacgtttgtaattttagtattttgggaggttggggcgggtggattatttgagtttaagagttttagattaatttggttaatatggtgaaattttgtttttattaaaaatataaaaattagtcgggtgtggtggtggacgtttgtaattttagttatttgggaggttgaggtaggagaattgtttgaatttgggaagtggaggttgtagtgagttgagatcgtgttattgtattttagtttgggtaataataacgaaaatttcgttttaaaaaaaaaaaaaaaaaaaaagagttaaaaggattttggtttttgggttgggttattgatttacgattattaggagtttttatttttaaatttttttgatttgttcgtttcgttttatttttatagttgttgtattggttatagttttatgattttatattttaattttttttgttttttttggtttatttttttatttttaaattatttgttacgttgtaattagtgtttaatatataaaattaattatgttttttttttgtttaaagtttttagtttttgttgtttagtggaattggcgtttgaggttatttttttaagtttaagcgtttaagttttgttgtaatttttaggtttttttttattatttatattaaattttttagtgtttgtaaaataagtcgagtaatttttagaattatatgttttcgttgttcgtttgttttgtttttaggatagggttttacgttgttatttaggtaggagtgttgtagcgtgattttagtttatagtagttttcgttttcggggtttaagaatttttacgtcgtagtttttcgagtagttgggattataggtacgggttaatatattcggttaatttttgtatttttagtagagacggggtttcgttatgttgtttagtttggtttttaatttttgagtttaagtaatttatttgtttcggttttttaaagtgttgggattataggtttgagttattgtatttagttagtttttgttgtttttgtttttgtaatttggaatattgtttttattttagttttttatttttatttttattttttttattatttatatttttttatttattttttaagattttaaaaattatttttgatttttttagaaaggtagtttattgtttattttattagattgaaagtagtggttgtgttttatttatggttaattttttagaagttggattgatatattttatttaattaaaattcgtattaggtgtttcggattgtagataagtttattataatttagaaggaagaaatagggaaggtatttgggggttgttaagtaatgaggtggggggtaggaattatgaattcgtatatttttaaaaattgttttagattttgatgtaaacggtataagagagtttgagaaatatagggttttttttaaatagttttgattttagtatttttggaaaaatgaaaattttttttttttgtttttaatgttttttttgttggtattttaggttaaaaaaaaatagataaaattagggggatttttttgggatttggttgggttgggaaataagtttgggttttaatataggtttagtttttgacgtattatgggtttttgtttttttttggggtttttattattacggttatttttatttttattaattgtgtgtttttgaggtagtgattgtttcgttttgagtattagtttttttattttttattagtcgtcgttagttttgacgttttatgagttatgtatattcgtagtttttcgtcgatttcgatggttttttttttttttttttaaggtttattcgttagggtgtagtcgacgtatttttaatgttaaggtcgtttttttatcgatcgtttttttttggtttcgatttagcgttaaaggtatgggtttttgtttcgtttgttttttaagtttagtcggggcggttagcgtaagcgtattgggtcgtatcgaggtttcgttttttgagtttgggtagcggcgcgagggtcgggagaatcgttcgcggaggaaaggcgaattagtaggttggggcggttacggcggtcggtatgggttacgttttttcgggaggaacgatgtgagggaggggtttggtaagagattggaatttcggaggtcgggagattttgtggttgaaatttttcgtaggagcggggtaattagtgtttagtgagggggttgggttggcgcgtattgattttagatttttcggattttttgtttttagatcgggtcggtgtcggggtatgtaggttagtgagattggagttagttagagttataacggggagcgattagggttaaattttgtttagggtggaagcgagcgggttcgtgaagtggggttagtttgggtagtcgatcgtgtcgttgtttcggggtttttttaggtattggtttaagttttggcgataaagtgcgatcgatttttttgtgggcgttttgaggttttcggtgatttgattcgtttgttatttattttttatttatttatgtgatgaatgaatatagtattaagcgcggttaattattaggtagagaagtgattaagataaatattgtttttacggtatagggaaaagtgatgggttgtagaatgtagaagttcggggcggagaatagggatagttttcggaacgaaatcgcgagtttagattaggagtggtggcgagagttttaaagagaagatagtacgtgttaagttttggaagggggatagaggttaatatattttggttattgaagatatttgattttgaatttgttttacgtttagggaagagatgatagtggtcggggttaggttataaattttggaaatggagataaataaaggaatttaaagtattatatatttaggtagtaaaatttataggatttggggagagtgagatgtaggaaataagtatttaaggtttgggtatttgggtggggtttattagagaagaagtagatttgtgggagataataataaattttattttggttgtatggagattcgtaggaaaaaattggatattttagtttgaaggtaggaaagtattgttgtgaagatgtagatttgaatgttattagtaaaatataaataaagttaagggagggttgaggttgtagaatgagaaaaataaagggtttatttagtatttttatttgattttttttttttttttttttttttttttttttttttttttgatagagttttgtttttgttgtttaggttggagtgtaatggtacgatttcggtttattataatttttattttttgggtttaagttatttttttgttttagttttttaagtagttcggattataggtatgcgttattaggttcggttaattttgtatttttagtagagatggggtttttttatgttggtgaggttggtttcgaattttcgatttcgggtgattcgtttgtttcggttttataaagtgttgggattatacgagtgagttattatatttggtttatggtgattatttttatgttttatttttttttatatttttagtatttagttaagggagtggtattaaatgtaaattagtgtttgttaattaaataaaagtttaatagtaaatagatgttggaattttagagttgtggaacgatgggggtttatggagggttttattattttaatgttaaggtaatgggtttttgttttggttttgttattaggtttttgtgtgatttttgataagtttttttttatttataaagagagtatagttaaaaaatggttttatgtatagagttttaaatattgttgataaattttatattgattttttttttttaatttatatagtaattttatttgaaagggaagtcggttgggcggggtggtttacgtttgtaattttagtattttgggaggtcgagagtgggggattacgagatcgagattattttggttaatacggtgaaatttcgtttttattaaaaatataaaaaattagtcgggtatggtggtaggtgtttgtagttttagttattcgggaggttgaggtaggagaatggtatgaatttaggaggcggagtttgtagtgagtcgagatcgtgcggttgtattttagtttgggcgatagagttagatttcgttaaaaaaaaaaaaaaagaaagaaagagggagggagagagagagaaagaaagaaaaagaaggaaggaaggaaggaaagaaggagggaagggaaagggaaagggaaaaggaaggaaggaaagaagggaaagggagaagtcgtattattatggatttaaatttaggtttgtttgtttgtttgatttgaattttgttttttattatgattgtttttatgtatgttttatttaatagggatattattaggatttttttgagattatatgcgtatttttttaaagtattgtgttgaggttggtagatttttataattggtttggtattggttttgttatggggatagggggatagagttgaatgtgatggaggttttttattattttttaattttttttttggggattattgagttgggtaattatgttttgttaaatggtaatagggtagaataaaattagtgattgtgtttttagatttttatttagattttaaatttttgaggtttgttgaaaaatgaatgagtattagggtgtgagtttgtatatttttgtatgtttttgggtaattaattagataattttttttattatattggatatttgggttttagtaatttttattttgttaatgtgattttttaaaaatattttttgttttttggtgttttgatgataaatgtttatatatggaatgtagttattttttgttattaagattttttttggtttgtataagggaggagtttattttattcgtattttatggtattttataaagagttttttttttttttttatgtaatttatttgagatttgttgatatgagttgttggagtttgaagggaattaataatgtattgtagtgatttttattttaggaaaatttgttaaaaatataaagtttcggttgggtgtgatggtttacgtttgtaattttagtattttgggaggtcgaggcgtgtggattataaggttagaagattaagattattttggttaatacggtgaaatttcgtttttattaaaatataaaaaattagttaggcgtggtggtgtgtgtttgtaattttagttatttagggaggttgaggcgggagaattatttgaatttaggaggcggaggttgtagtgagttaagatcgagttattgaattttagtttaggcgattgagtgagattttatattaaaaaaaaaaaaatataaagttttaattttttttttttattaggttttttgtattagagtttttgggatggggtttaggaatttgtatttttttttagttttttagaatgtttagttaggtttggaaattgatttattcgattttttttgttttatagttagggaatttgtagttttgggaagggaaggaatttgttttagttatatttgatattagtgtttttttttttaatgaagagtttttaggttgggagtttagagatatgggtttaagtttaggttatattagttattatttcgggtaagttattttatttttttaagtttttgtttttttattgtgagaataatgttattgtgttgggaattaaaagagagagtggtaatggaaatgttttgttaagttttttattttgtgtatatggaagttgttaagagttagaattagttagtgtttatttttgtatattacgttgtttttttttaatagaggttagggttttgttgtgttgggggtggtcgttagttagtttcggtggttgttgggttttaggttatttgttattaatttttttttttttattttttgtagg

SEQ ID NO: 156 - DNA, 8899 bp, Artificial Sequence
  chemically treated genomic DNA (Homo sapiens)
tttgtaaaagatggagagaagagagttggtaatagatggtttgaagtttagtaattatcgaaattggttggcggttatttttaatatagtaggattttgatttttgttggaagggaatagcgtggtatataggagtgaatattggttggttttagtttttaataatttttatgtgtataaaatagaaagtttgataaagtatttttattgttatttttttttttgatttttaatataatggtattatttttatagtaaggaagtagaggtttggagaggtgaaatgatttgttcgaggtgatgattggtatagtttggatttgaatttatgtttttggatttttagtttaaaggttttttattggagaaagaagtattaatattagatgtgattggggtaagttttttttttttttagagttatagattttttaattgtgaaataagaagaatcggatagattagtttttaaatttggttgaatattttggggagttgggaaagaatatagatttttgggttttattttagagattttgatgtaagaggtttgatgggaaggaggggttgaggttttgtatttttttttttttgatatggagttttatttagtcgtttaggttggagtttagtggttcgattttggtttattgtaattttcgttttttgggtttaagtaattttttcgttttagtttttttgagtagttgggattataggtatatattattacgtttggttaattttttgtattttagtagagacggggttttatcgtgttagttaggatgattttgattttttgattttgtgatttatacgtttcgattttttaaagtattgggattataggcgtgagttattatatttagtcgaggttttgtatttttaataagtttttttgggataggagttattgtagtatattattaattttttttaagttttaataatttatgttagtagattttaaataaattatatgggaagggggagggagttttttgtggaatattatgaaatgcgaataaggtgaattttttttttatataaattagaaggaattttagtagtaggaaatgattatattttatatatggatatttattattaaagtattaaaagatagaaaatatttttgagaaattatattagtaagatggaaattgttgaaatttaagtgtttaatgtaataggagaagttgtttgattggttgtttagagatatatagaggtgtataaatttatattttgatatttatttattttttagtaggttttaggagtttaagatttgggtaaaaatttggaaatatagttattaattttgttttgttttgttgttatttaatagaatatggttgtttaatttagtggtttttaggaagggagttagagaataataggaaatttttattatatttagttttgtttttttgtttttatgatagagttagtgttaggttaattatgaaagtttgttagttttagtataatgttttgaaagaatgcgtatgtgattttaagagggttttgataatatttttgttgagtgagatatatatgagggtaattatagtaaagaataaggtttaagttagatagatagatagatttgggtttgagtttataataatacgatttttttttttttttttttttttttttttttttttttttttttttttttttttttttttttttttttttttttttttttttttttttttttttttttttttttttttttttttttttttttttttttttttttttgacggagtttggttttgtcgtttaggttggagtgtagtcgtacgatttcggtttattgtaagtttcgttttttgggtttatgttatttttttgttttagtttttcgagtagttgggattataggtatttgttattatgttcggttaattttttgtatttttagtagagacggggttttatcgtgttagttaggatggtttcgatttcgtgattttttattttcggttttttaaagtgttgggattataggcgtgagttatttcgtttagtcgattttttttttaagtaagattgttgtgtggattaaaagagaaaaattagtgtgaaatttattagtagtgtttgaagttttatatatgagattattttttggttgtattttttttataggtaggaggagatttgttagaggttatatagaagtttagtggtagagttaggataagaatttattattttgatattagagtaatgaaattttttatgagtttttatcgttttataattttgaaattttaatatttgtttgttgttgggtttttatttagttggtaaatattgatttgtatttaatgttatttttttgattaggtattggggatatggaggaggataagatataaagataattattatgggttaggtgtggtggtttattcgtgtaattttagtattttgtgaggtcgaggtaggcggattattcgaggtcgggagttcgagattagttttattaatatggagaaattttatttttattaaaaatataaaattagtcgggtttggtggcgtatgtttgtaattcgagttatttgggaggttgaggtaggagaatagtttgaatttaggaggtggaggttgtagtgagtcgagatcgtgttattgtattttagtttgggtaataagagtaaagttttgttaaaaaaaaaaaaaaagaaaaaaagaaagaaagaaaagaaattagatgaaggtgttaagtgggttttttgttttttttattttatagttttaatttttttttggttttatttatgttttgttgatgatatttaaatttatatttttatagtaatatttttttatttttaaattagaatatttaatttttttttgcgagtttttatataattagaatagaatttgttgttgttttttataaatttgttttttttttgatgaattttatttaggtatttaagttttgagtatttgttttttatattttattttttttaaattttatggattttgttgtttaagtatatagtattttgaatttttttatttatttttatttttagagtttgtagtttagtttcggttattgttattttttttttgggcgtgaaatagatttagagttaggtgtttttagtgattaggatatgttggtttttgttttttttttaggatttggtacgtgttgttttttttttggaattttcgttattatttttgatttgggttcgcgatttcgtttcggaagttgtttttgtttttcgtttcgggtttttatattttatagtttattatttttttttgtatcgtaggaatagtgtttgttttgattatttttttatttagtaattagtcgcgtttagtattgtatttatttattatatgaatgaatgaagaatgaatgatagacgggttagattatcgaaagttttaaaacgtttataaggaaatcggtcgtattttatcgttaggatttaggttagtgtttggaaaggtttcgaggtaacgatacggtcggttgtttaggttggttttattttacgggttcgttcgtttttattttggataaagtttggttttaatcgtttttcgttgtagttttaattggttttagttttattggtttatatgtttcgatatcggttcgatttaaaggtagaagattcggaaagtttgggattagtgcgcgttagtttaatttttttattagatattagttgtttcgtttttacgaagggttttagttataaggtttttcggttttcggaattttaattttttgttagattttttttttatatcgtttttttcgaggaaacgtgatttatgtcggtcgtcgtggtcgttttaatttattagttcgtttttttttcgcgaacggttttttcggttttcgcgtcgttatttaggtttagggggcggggtttcgatgcgatttagtgcgtttgcgttgatcgtttcggttaggtttaaagagtaggcggggtagagatttatatttttggcgttgagtcgaggttaggaaggggcggtcgatgagagggcggttttagtattaggagtgcgtcggttgtattttggcggatggattttgggaaggaggggaggggattatcggggtcggcggggagttacgggtatgtatagtttatagagcgttagagttgacgacgattagtggaagatggggaaattaatgtttagagcgggatagttattattttaggggtatataattgataagggtgggggtggtcgtggtaatggaggttttaaggaggggtaggggtttatagtacgttaggggttgagtttgtattagaatttaggtttgttttttagtttagttaagttttagaaaaatttttttgattttatttatttttttttaatttgggatattagtagggaaagtattagaggtaaaaggaaaggatttttatttttttaggaatgttgaagttaggattgtttgaggggagttttgtgttttttagatttttttgtatcgtttatattaggatttggggtagtttttaaaaatatgcggatttatgatttttattttttattttattgtttggtagtttttaggtgttttttttgttttttttttttgggttgtgataggtttgtttgtagttcgaagtatttgatacgaattttagttaaatggaatgtattagtttagtttttagggaattaattataaataagatatagttattgtttttagtttgataagataggtaataaattgtttttttgaaggaattagggatggtttttggggttttgaaggatggataggaaggtataggtagtgaaggaggtaggggtagaggtgagaggttgggatggggatagtgttttaaattgtaggaataaaagtagtaaaggttggttgggtgtagtggtttagatttgtaattttagtattttgagaggtcgaggtaggtggattatttgagtttaggagttggagattaggttgggtaatatggcgaaatttcgtttttattagaaatataagaattagtcgggtgtgttggttcgtgtttgtaattttagttattcgggaggttgcggcgtgagaatttttgagtttcggagacggaggttgttgtgagttgagattacgttgtagtatttttgtttgggtgatagcgtgagattttgttttaaaaataaaataaacgagtagcgaaggtatataattttgagggttgttcggtttgttttatagatattgaggagtttggtgtggataatgaggaagggtttgagggttgtaataggatttaggcgtttaggtttggagaggtagttttagacgttagttttattgagtaataggagttaagggttttaagtaggggaaggatatggttagttttgtgtgttaggtattggttatagcgtgataaatggtttggaagtggggagatgggttagagaaagtagagagagttaagatgtgagattatgaggttgtagttagtgtagtagttgtggagatggagcgaagcgaatagattaaagaaatttaggagtgagaatttttagtgatcgtaaattagtggtttaatttagggattaagatttttttgattttttttttttttttttttttttgagacggagttttcgttgttgttgtttaggttggagtgtagtggtacgattttagtttattgtaatttttattttttaggtttaagtaatttttttgttttagttttttaagtagttgggattataggcgtttattattatattcggttaatttttgtatttttggtagagatagggttttattatgttggttagattggtttgaaatttttgagtttaggtgatttattcgttttagttttttagagtgttaggattataggcgttagttattgcgttcggttttttttgattttttaaataaattatgtatattatttgattataggataggttgagttttttagtttttcgtgtgtggttacgggatggggggagatggtggtagataggtgtttggttatttttagaataatgttttttgatgtttttttttcgttggtttttgtatttgaggggataagtagttgttaattagaataggttttaggtggtaggaagaggtttttgggttaattaggaataaaagaagttatttttagtgtagtatgaaattaaaaattaaaagtatgatttagggttttttgtgtaggttttttttttttaagacgggtgttaagtgatgagtattaggtgtttatggtgagatttggggaggattttagattttaatagttttttggttgaaattttttataatgtggtaggtaagatgtttttatttttattttgtagatgtggtagttgagttttagaagttacgtgatttgtttaaggtgatttagtttgtggtaggattgggagtgaaggatttttgattaagaatttttttagggagcgtttgttttttttgtattttttgtttgggtgtttttttttaaaattttggtatgattggtttttttggttatttagatgttttatttttggaggttgttttattttataagtttattacgttattttttttttttttttgagatggagttttattttgttgtttaggttggagtgtagtggtgcgattttggtttattgtaatttttgttttttgggtttaaataatttttttgttttagttttttgagtagttgggattataggtacgtgttattatgttcggttaatttttgtatttttaggagagatagggttttattatgttgattaggttggttttaaatttttgattttgtgattcgttcgtttttgttttttaaagtgttgggattataggcgtgagttatcgtgttcggttttgtattttttttatagtagttatttatatttgaaattgttgtttttatttgtttgttgtttttttttgttagaatgtgagttttatgaaaatgggttatgtttgttttgtttattattttatttttaggatttgattggtgtttgttacgtggtagatgtttaataatatttgttaattgatggaaatagtttggggagagagaaagagaaggaaattaatatttaatgaaagttgaggatgttttaagtattttttataaattattttatttaatttttttatagttttttaaggtagaaatcgtatttttattgggtgaataagaaattatgttaagttaggttaagtttgtggtttgttatttttgaggttatagattcgtttgagatttattagtataaaattttgtattagttacgtggaggaatttatagatttttttaggtttatttggggattttagattaagatatataggattggggaatttgtttagggtttttttggttttaggtttttgttggatttttattttttggtaaggatggagtttatgtagtggattgtagggaatttgttgaagatttcggagtagagggagatgatttgttttgagtttttggtgttttagatttgagtttgaattttgattgtgtagaagttattttattttttcgaattttattttttttattttatttttttttttttttttttttttttttttttgagatggagtttttttttgttatttaggttggagtgtagtggtacgattttggtttattgtaatttttgtttttcgggtttaggtaatttttttgttttagtttttcgagtagttgggattataggtatatgttattatgtttagttaattttttgtatttttagtggagatagggttttattttgttgtttaggttggtttcgaatttttgatttcgtgatttgtttgttttagttttttaaagtgttgggattataggtgtgagttatcgcgtttggttttttttatttttaaagtgaaatttgtttttttttaataataattattttttattgatttggtcgttaagtgttaggtatttggttaatgattttatagtcgttattttatttttttttatttttttattatattagtatttttatagtttttattttatagtcggggaaaggaaggtttgaagaggtattttgatttgttaaagattatagtagtagtgttagttatggtgtttttatatatgtattttgggatatgttatgggtttagattttttaaagttaattgttgaattaattttattttttgtttttggggtttgtgggaatatttgggtttgaattaggtgaaaaaaggtatgtagggatgtattttattgtgaatggaggttaattttttaattttgtgttttgtttttttttttgcgagggtttttttttaagtttggattgtgggttttttttgtttttgtttttttgagatggagttttgttttgtagtttaggttagagtgtagtggcgttattttggtttattgtaagtttcgtttttcgtgtttatgttatttttttattttagtttttcgagtagttgggattataggcgtttgttattacgttcgtttaattttttttatttttagtagagatggggttttatcgtgttagttaggatggtttcgattttttgattttgtgatttattcgttttagttttttaaagtgttgggattataggcgggagttatcgtatttagttattggattgtgttttttgattggaatatttttgttagttttagggtttgtattatatatggtttgtatttgtgtatatggttattgtttttttttagtagtgatattattttgttttatattgttgtttatgaggttatttttttatttggttgggggttattgttttggttatttagagtggaatttttttgttttttagtttttagtataggtttgggttag

SEQ ID NO: 157 - DNA, 9021 bp, Artificial Sequence
  chemically treated genomic DNA (Homo sapiens)
tgtttagtttagggtttgtgaatgtacgaatcgatattttgtatttagttattttggtggggaggtggagaatttttgtgtttagtttagggattgtaaatatattaattagcgttttgttaaaatagattattcggttttattaattagtaggatgtgggtggggttagataaaagaataaaagtaggttgtttgagttagtagtggtaagttgtttgggtttttttttatattgtggaagttttgtttttttttgtaataaattttgttgttgtttattttttgggtttatattgtttttatgagttgtaatatttattacgaaggtttgtagttttattgttgaagttaatgagattacgaatttttcgggaggaatgaataatttgagacgcgttgttttaagagttgtaatatttatcgcgaaggtttgtagttttatttttgagttagcgagattataaatttattagaaggaagaaatttcgaatatatttgaatattagaaggaataaatttcggatacgttatttttaagaattgtaatatttatcgcgagggtttacggttttatttttgaagttagtgagattaagaatttattaatttcggatatattagttattagggaggttgaggtgaggggattatttgaatttaggaagtcgagggtgtagtgagtcgagattatgtcgttatattttagtttgagtgatagagtgagattttgtgttaaaaaaatagaataaaataaaataagaacgttgaataggttgtgtgttaattttgagatggagtttagatttaagaatgattttgaggtttagatttatatttaagaggatgattttagtttggtatttataggttttttaggtattttagatgtattttgttttgaattaagttttttgtttttgaatttgttttttttggtaaatagtattaagggggttagaaatttgggggttgtttttatttttttttttttattatgtatttttaatgggtggttggatttgtggttgtattttcgtgattttttagtttttttttagtgatggttttaggtgggtttttattttgttttttaaatggtttttttgttttgagttttattttatttgtttttagtttatttattgagttattttagagattattttgattttttgtggatatttttttggtggttttttttttttgttagttagaaattgtttttgattgtatgtaataaatgtggttacgttatttaattaaataaaggtttatttttttcgtgatgaaaagtatatagataagtagtttatttttatcgataattattgagggttttttatgatttttatagtaatgaaatgtgtatttatagtataaagatatataattttaaggttttaatataattgggtttaagtatagtattttttgttttagtttttaattgtttaggtgattttattgtgtagttagggttgataaatattgtatttaggtttagtgtttttgatttgtagttgaggtttagagagaattattgaaattgtagttttagttatttgggaggttgaggttggagaattgtttaagtttagcggggtgaggttgtagtgagttaagattgtattatcgtattttagttcgggcgatagagtaatattttatttaaaaaaaaaaaaatttttggtttatttttttgtttattttttaattatagaggtttttaaatatgaatttttatttttaggaaggttgaaatgatatattataagcggtttagttatttgtacgtgtcgttatttgatttaaggtatttatttttttttattatttttgataaagttgaattgtttatatgtgttatatttttttttttttttaattttttttttttttttttttttttttttttttttttttttttttttttttttttttttttttttttttttttttttttttttttttttttttttttttttttttattttttttttttttttttgatagggtttgtttgttttgtttttttaaattttggggtttaagtgtaaaggttttttttatttgatttttttattttattttatttaagttagatattttacgatgatgatgatgattattgttgagataggattttattttgttgtttaggttggagtgtaatggtgcgattataatttattgtagttttaattttttgggtttacgcgatttttttattttagttttttaagtagtttggattataggggtgtattattatgttcggttaattatatgtgttagatttaatttacgttttagggttttaaataattaaggttttattattttgttttaataaatatatttttataaagatttggaaggtaggttgaaatgtggaatttttggattttttttagttttacgtagaagggtagtagtggagagttggttgtttgttcgtttttggtttttttttttttttttatttttgttttttgtggtattgggtagggtttacgtttaaggttagtagtgtatttaataagggatagtttttgtgtggtttgtttaggattttatatataggtttagggttttttgggtaggaaattttaggattcgggtatttaagtggtgttttaaatagtggtttttggtcgggtgtggtggtttatatttgtaattttagtattttgggaggtcgaggttggtagattatttgaggttaggagttcgagattagtttggttaatatggtgaaattttatttttattaaaaatataaaaatttagttaggtatggtgtgtacgtttgtagttttagttattcgggaggttgaggtaggagaattatttgaatttagtaggcggaggttgtagtgagttgagattgtattattgtattttagtttggtgatagagtgagattttatattaaaataaatatataaataaataaaaatagtgatttttaattgggagtgatttggtaacgtttggaattatttttggttattttagtttggtagggagggatagggtattattggtatttagtgagtaggggttagggattttattgaatattttatagtgtataggatagtttttatagtaaagaattgtttggtttaaaatgtttatagtgtttatattcgatgttttgtattaggaagatataaatatttttaaatattatagagttaaattttttatttttgttttagtagagatgatatttttgcggggggagtatttttttggttttaatatatttttttttttatgggagatgatgttagaagagggatagaataggacgattattttacgaaggtattatttaggtattattagatcgttttaaaagaagagtaatttattgttttaaagtagttttttcgtgtttgtgggcggattttttggtaagtttataatgaattgaaatttgtcgaattttttggaatttaaagaaattttagttttgggtaaaggttttttggttagtatttgtattgtttatgtaatcgtttagaatatacgaattatttggagattattattaaatataataggtaaaattgtaaatatgtatattttttagaggatgataaaaaaatgtgaattgtatttttttgatagaggatgtattagagtttgagggtttaaatagcgtaaataataaataagtaaataaatcgatagtagtgtattttaaacgaggttggaatagtttttattgttgttttatattggattttaattaagttttagtattttgttatatttaatattaagtattaggttggacgtggtggtttatgtttgtaattttagtattttgggaggtcgaggtgggtagatggttggtttgagtttaggagtttgaaattagtttgggtaatatggtaaaattttatttgtatttaaaatataaaaattagttaggtgtggtggtatatgtttgtggttttaggtatttgggaggttgaggtaggaggatggtttgaatttaggaggtggaggttgtagtgagttatgatggcgttattgtattttagtttgggtgatagagcgagattttgttttaaaaattaaataaataattttttcgtttcggataaaagtagtttgtattatttttttattttataatatgtttttgaaatattttttttgaaaggtaagttatatttattatttttgttgtatggaggtattataaattattttattattttattttttttgagtgttgtggtttttaggttagataaaaacgtaggtgatgtttagaagttaattagttgtcgtttggttatttgtagggttgtggttttgttaaataggaaaaatataaaaagaatatcgaattttgttaattaaataagaaattttatattaaggattaagaaaattgtaggggaagaaaaggtaagtttcgggattgaggtgtagcgattttttatatttttagaaaattaaaaaataagataaaaaaatgaaaattataaaagtatttattttggggcgttttaattgttgagtaataaatgagacgttgtggttaaatttagttataattaatgatatttttagataaagtgattttagatttttaaagcgtattttgtttatattattttgttaatttcgcgtattgtaatcggcgggttacgttttcgtgaaaagaaggttgttttttttatatttcggggttttggacgtttttcggttgcggggcggggggagttttcggcgtacgcggttttttggtttcgtttttagttattttcggttattcgcgattcgaggttgtcgtagggggcgggttgagcgcgtgcgaggcgattggtttggggttagagtgggcgaggcgcggaggtttggtttataaagtagtcgcggagacggggtgttggtttgcgtcgtagttttttgtagcgtttggggttttcgttgtagttttcggaattaggatttcggcgtggtttagcgagttatggcgacgaaggtcgtgtgcgtgttgaagggcgacggtttagtgtagggtattattaatttcgagtagaaggtaagggttgggacggaggtttgtttgcgaggtcgtttttattcgttcgttttttcgcgtatttttgttaggagcgggtcgttcgttaggtttcggggtcgttttggtttagcgttcggtttcggttcgtgtcgttcggtcggtgttttcgtttttagcggtgcggtgtttaagtgttgagttatcgggcgggttcgggcgcggggcgtgggatcgaggtcgtcgcggggttgggtttgcgcgtggcgggagcgcggggagggattgtcgcgggtcggggaggggcgggggcgggcgtgttgttttttgtggtttttgggtcgtcgtcgcgggtttgtcgtggtgtttggagcggttgtgttcgttttttgtttggtcgtgttttcgtttttgagggtttcgcggatatcgagtggcgtagtgttaggtttagttcggggatggcgattgcgtttgggttcgtttggtgttttcgtattttttttcgtttttcggttttagcgttttaggttagggagttttcgtttttgtatagttttaaggttaggaatggtttttatatttttaaaaggttttggaaaataaaaatacgtaatagagatcgtttgtgtgatattttgtagggaagtttgttggtttttgttttaggttatgattgggttgtaagggtagagaaggtagttttgaatagaggttttttttttttttttaagtttcgggagttagaggtttaattgatttttttggggatttttgagggtagtgattttaattttgggtgtatagttagtttatttgaagattttattaaaaatatattagagtttaattttcgattaattatattaaaatttgttttagtgtagggtgagtattgttgttttttgaaagtttttaaaagtgattttgatgtgtatttacgattgagaattgtcgtttgaggatagtgggtggagtttcgtatttggaaattagaagatttggagtttttattatatcgaattggtatttaataattgttgtcggagtattttttaagttatattttcgtaaagtggttttaaaattgttttgttagtaggtaggttgttaagatggttagagataaatttttgaacgatttttgtaaaatatatagaaatatttttagaatttttattagtaaaattataaaacgtgttgtaaggaaggtgtttgtgataatattgtttttagaattttagtgaagttattaattggtggaaaatttttttttgtattcggtttaaaaattatgagggaatatttattatacgaatgagatttagtttttaaaggggtttatagaaacgtgagaggataggaatagttagtttgtgtaaatgtttgaaatatatgtgagggagataatgagtttagtttttttttttaataggtttttagattttttggaaaaggttttttggtatttgattttattttgttgttttatttgttagatttttttttgtttttttttatttttttttatataatttattagtattagtgttttgttttttagattaagtttcgttttgtcgtttaggttggagtgtagtggcgcgattttagtttattgtaattttcgttttttaggtttaagtaatttttttgttttagtttttcgggtagttgggattataggcgcgcgtcgttacgtttggttaattttttatattttagtagagacggcgttttattatgttggttaggatggtttcgatttgttgacgtcgtgatttattcgtttcggttttttaaagtgttgggattataggcgtgagttatttcgttcggttattagtgttatttttaagacgtttttgaggaattttttttttttggttattgagaatttatgtatgaatttaggttttttattttttttgagtagtttgtatagtttttttttttaagcgtttgatttcgttttgtttggtgttcgttgtatttgagaatgagttttggatagtggagtattttagttttttagatatgtagagataatatattggttattagttatttggtttggtttatttcgtgtttaaaattttggattttttgttagtttttatagattagaattttttacgtattaatttagtttttttagttttttttgaagaatttttggagatttttttatattgagtttttattagtttaggatagtattgttgtagtagtttatatattttttcgttttttaggtttgtgttatttatttaagtttatagtttggtttttgtagggttgtattcgagtatagttatttagatgttttgaatgtattatcggttaaatggaggttttaaagaatttgttgtttttggttttgtgtttttgataatagagtgtttgagggataatttttatatttgagtttttttaaaattaaaggttgtagaagagttatagtatttattgttaaaaagaaaagaatttaaaaaggtagtaattgttaggatattttatttgagtaatgatattttttagtggaaagttatattttaagggttaatgttttttaattgttggtcgtatttgaaaataaattaagttaaaaataagagatattgatatgttgtatgacggtgtggtgtggatgttgtgtttattttagttttgagatttagttgtaatttttttgatttttgtatgtagttacggagtattattatttgttattattatttgaatggttatattgtttgtttttattttggtagagtggaaaggttatttaggttttagtgtttgaaaagattttagaaagtagtagtacgtttggttagattagaattagtttttttttgggggtagtggaatataatattttttgattgttaattaaaaatatttgtgatagtcgggcgtggtggtttacgtttgtaattttagtattttgggaggtcgagacgggtggattacgaggttagtagatggagattattttggttaatacggtgaaatttcgtttttattaaaaatgtaaaaaaattagtcgggtgtggtggtgggcgtttgtagttttagttatttaggaggttgaggtaggagaatggtatgaatttgggaggcggagtttgtagtgagtcgagattatgttattgtattttagtttgggcgatagagcgagattcgttttaaaaaaaaaaagaaaaaaatttatgatggatatttaaaaatatttattgagtggggagtggagagtaggggttttagggtagtttgttggatatttttagggcgattttttttttttttttttttaaagttaagtgagtatgttatatggaaaagggtgtgcgtggagaaaaagtaaggggttttagagtgtaggatgagatatatattttttgggttaaaaaggttgaggtaggagaatggcgtgaattcgggaggcggagtttgtagtgagttgagattatgttattgtattttagtttgggcgatagagcgagatttttgttttaaaataaaaaacgtttatatgtatatgtatatttaatatgtataaatataatttatttaaaagtatttattatataaataggtatttatattatttatttattgtaatagttaaagtttatgaagtatttaatattgatgtgtaggtatttattttgtttgttattttattaggtgttttttatgttatttaattatgaagtttggttatagggtgtttgtgtattgagtgtgggaataagattattattttttttttgaggatataggtttagagtagttaagtagtttgttggaggtttattggttagaaagtggttagtttgggatttggatatagatttttttatttttaagtttggttgttttttattttattgtgaggggtaaaggtaaattagttgttttttttgtttagaaattttttttaattttgtattttttttaaagg

SEQ ID NO: 158 - DNA, 9021 bp, Artificial Sequence
  chemically treated genomic DNA (Homo sapiens)
tttttaagaaaagtgtaaagttggagagagtttttgaataaagaaaatagttgatttatttttattttttatagtgaagtaaaaagtagttagatttgggagtggaaaaatttgtgtttaaattttaggttgattattttttagttagtgaatttttagtaagttgtttaattgttttaggtttgtgtttttaaaagggagatggtaattttgtttttatatttaatgtataagtattttgtggttaggttttatgattaaataatataaaaagtatttaatagagtggtaagtaaagtgagtatttatatattagtgttagatattttataggttttgattattatagtaaataggtaatgtaagtatttatttatgtagtaaatatttttgaataggttatatttgtatatgttgaatatatatgtatatgtaaacgttttttattttgagataagagtttcgttttgtcgtttaggttggagtgtagtggtatgattttagtttattgtaagtttcgtttttcgggtttacgttatttttttgttttagtttttttaatttaaaaggtgtatgttttattttatattttggagttttttgttttttttttacgtatatttttttttatatggtatatttatttgattttaaaaaaaaaaaaagaaaaagtcgttttggaaatgtttaataggttattttgggatttttgttttttattttttatttagtgagtgtttttaagtgtttattataagtttttttttttttttttttgagacgagtttcgttttgtcgtttaggttggagtgtagtgatatgatttcggtttattgtaagtttcgttttttaggtttatgttatttttttgttttagttttttgagtagttgggattataggcgtttattattatattcggttaatttttttgtatttttagtagagacggggttttatcgtgttagttaggatggtttttatttgttgatttcgtgatttattcgtttcggttttttaaagtgttgggattataggcgtaagttattacgttcggttattataggtatttttaattagtagttagaaaatattatattttattgtttttaggagaggattgattttagtttaattagacgtattattgttttttgaaatttttttaagtattgaaatttaggtaatttttttattttattaaaatgaaagtaagtagtatagttatttaggtaatggtgataggtaatggtgtttcgtggttatatatagaaattaaggaagttataattagattttaggattaaaataaatataatatttatattatatcgttatataatatgttagtgttttttgtttttagtttggtttgtttttaaatacggttaatagttaaggggtattaatttttaagatgtgattttttattggaaaatattattgtttaaatgaagtattttggtaattgttgtttttttaaatttttttttttttgataatagatattgtgatttttttataatttttaattttggaaaaatttaaatgtgaaagttgttttttaaatattttgttattaagagtatagggttaaaaatagtaggttttttgaaatttttatttaatcggtaatatatttaggatatttaagtagttgtgttcgggtataattttgtagggattaggttatgaatttaagtgaataatataggtttgggaagcgaaaaaatatatgaattgttatagtagtattgttttgggttaatgaaggtttagtatgaagagatttttaaaaattttttaagagaagttaggaaaattggattaatacgtgaaaaattttgatttgtaaaaattagtaaagagtttaagattttaaatacggaataggttaagttaagtagttgatagttaatgtattatttttgtatatttggaaagttggaatgttttattatttaaggtttatttttaggtataacgggtattaaataaaacgaagttaggcgtttaaaagaaggaattatgtaagttgtttagggaaggtggaaaatttgggtttatgtatggatttttaatggttagggagaagggattttttagaggcgttttaagaatagtattggtggtcgggcggggtggtttacgtttgtaattttagtattttgggaggtcgaggcgggtggattacgacgttaatagatcgagattattttggttaatatggtgaaacgtcgtttttattaaaatataaaaaattagttaggcgtggcggcgcgcgtttgtagttttagttattcgggaggttgaggtaggagaattgtttgaatttgggaggcggaggttgtagtgagttgagatcgcgttattgtattttagtttgggcgatagagcgagatttggtttgaaaaataaaatattagtattggtgaattatgtggggagaagtaaagagggataaaaagaagtttgataaatgaaatagtaaaatggagttaaatgttaaagaattttttttagaaaatttggagatttattaaagaaaaaggttaaatttattattttttttatatatattttagatatttatatagattaattgtttttgtttttttacgtttttgtaaatttttttaaagattgaattttattcgtatagtaaatatttttttatgatttttaagtcgagtgtaagagaaaattttttattagttggtaattttattaaggttttggggatagtgttattataagtattttttttgtaatacgttttgtaattttattgataaaagttttgaaaatatttttgtatattttataagagtcgtttagaagtttgtttttgattattttagtaatttgtttattggtagagtaattttaaagttattttacgaaaatgtggtttaagaaatgtttcgataatagttattaagtgttaattcggtgtaatggaaattttaggttttttaatttttaaatacgaaattttatttattgtttttaaacgatagtttttaatcgtaggtgtatattaaaattatttttggaaatttttaaaaaatagtaatatttattttgtattaggataggttttgatgtaattggtcggaggttgggttttggtgtatttttagtaagatttttaaataagttaattgtgtatttaaagttaagattattgtttttaaaaatttttaaaagggttagttaaatttttggttttcggagtttaggaggaggaaaaggatttttgtttaaggttattttttttgtttttgtagtttaattatgatttagaatagaggttagtaaatttttttgtaaagtgttatataaacggtttttgttgcgtatttttgttttttaaagttttttaaaaatataaaaattatttttagttttagagttgtataaaagcgaagattttttgatttagagcgttgaagtcggaaagcggagagggatgcgaagatattaggcgggtttaggcgtagtcgttattttcgggttgggtttggtattgcgttattcggtgttcgcgggatttttaggaacgagaatacggttaagtaagggacgagtatagtcgttttaggtattacgatagattcgcggcggcggtttaaggattatagagggtagtacgttcgttttcgttttttttcggttcgcggtaattttttttcgcgttttcgttacgcgtaggtttagtttcgcggcggtttcggttttacgtttcgcgttcgggttcgttcggtgatttagtatttgggtatcgtatcgttgggggcgaaggtatcgatcgggcggtacgggtcgggatcgggcgttggattagggcggtttcgaggtttggcgggcgattcgtttttagtaaaggtgcgcggggggacgagcgggtgggagcggtttcgtaaataagttttcgttttagtttttgttttttgttcgaaattgatgatgttttgtattgggtcgtcgttttttagtacgtatacggttttcgtcgttataattcgttaggttacgtcgaggttttggtttcgaggattgtaacggaaattttagacgttgtaggagattacgacgtaaattagtatttcgttttcgcgattattttataggttagattttcgcgtttcgtttattttggttttaaattaatcgtttcgtacgcgtttagttcgttttttgcggtagtttcgggtcgcgagtggtcgggaatgattgggggcggggttaaggggtcgcgtgcgtcggagatttttttcgtttcgtagtcgggaaacgtttagaatttcgaaatgtggagaaaataattttttttttacgggggcgtggttcgtcggttgtagtacgcgaaattggtaaaatgatgtaaatagggtacgttttgaaaatttgaagttattttgtttagaaatgttattagttatgattgagtttggttatagcgttttatttgttatttagtaattgggacgttttaagatggatgtttttgtagtttttatttttttgttttgttttttagttttttgagggtatagaaagtcgttatattttaatttcgggatttattttttttttttttgtaatttttttagtttttagtatagagttttttatttggttggtagaattcggtattttttttatattttttttgtttggtaaggttataattttatagataattaaacggtaattagttggtttttaggtattatttgcgtttttgtttggtttaaaggttataatatttaaggagggtagaatggtgaaataatttatgatgtttttatataataggaatgataaatatgatttattttttaagggaaatattttaaaaatatattgtgaaatgagaaaatagtgtaaattatttttgttcggggcgagggggttgtttgtttgatttttgagatagggtttcgttttgttatttaggttggagtgtagtggcgttattatagtttattgtagtttttattttttgggtttaagttatttttttgttttagttttttaagtatttgggattataggtatgtgttattatatttggttgatttttgtattttgggtatagatggggttttattatgttgtttaggttggttttaaatttttgagtttaagttagttatttatttatttcggttttttaaagtgttgggattatagatatgagttattacgtttagtttagtatttaatattgagtatggtaaaatattgagatttaattgaagtttagtgtgaaataataatagaagttattttagtttcgtttggagtatattattatcgatttatttatttatttattatttacgttatttagatttttagattttaatgtattttttattagagaaatataatttatatttttttattattttttaggaagtatatatatttgtagttttgtttgttgtatttggtagtagtttttagataattcgtatattttaaacggttgtataaatagtgtaaatgttggttaaagggtttttgtttaaggttaaagtttttttgggttttaggaagttcggtagattttagtttattgtaaatttgttaagggattcgtttatagatacgagagagttgttttgggatagtgaattattttttttttgagacggtttaatgatgtttgggtggtgttttcgtaggatggtcgttttgttttgttttttttttggtattattttttatggagaaaagaatgtgttgaagttaagaagatgtttttttcgtaagaatattatttttgttagaataggggtaaggaatttaattttgtgatatttaagagtatttatatttttttaatgtagggtatcgaatgtgggtattatggatattttgggttagatagttttttgttgtggaggttgttttgtatattgtaggatgtttagtagaatttttagtttttatttattagatgttagtaatattttgtttttttttgttaggttgggataattaaaaataattttagacgttgttaaattatttttagttaagaattattgtttttatttatttatgtatttattttgatatggagttttattttgttattaggttggagtgtagtggtgtaattttagtttattgtaattttcgtttgttgggtttaagtgatttttttgttttagtttttcgagtagttgggattataggcgtgtatattatgtttggttaagtttttgtatttttagtagagatggggttttattatgttggttaggttggtttcgaatttttgattttaagtgatttgttagtttcggttttttaaagtgttgggattataggtgtgagttattatattcggttaagaattattgtttagaatattatttgagtattcggattttggaattttttgtttaaagagttttgagtttgtgtataggattttgaataggttatatagggattgttttttgttgagtatattgttagttttgaacgtaggttttgtttagtgttataaggagtaggggtggggaaaggaggaaaggttaggggcgggtaggtagttagttttttattgttatttttttacgtagaattgaaagaagtttaagaattttatattttaatttgttttttaggtttttatgaaggtatatttgttaagataggatgatagagttttggttgtttggaattttggaacgtgggttgaatttggtatatgtaattagtcgggtatggtggtatatttttgtagtttaagttatttgggaggttgaggtaggaggatcgcgtgggtttaggaggttgaggttgtagtgagttgtgatcgtattattgtattttagtttgggtaatagaatgaaattttgttttaataataattattattattatcgtggagtatttaatttaaataaaataaaatagggaaattagatgagagggatttttgtatttgaattttagggtttaaagaagtagaataggtaaattttgttagaaagaagaaaagagagtgagagagaaagagaaagaaagagaaagagagaaagaaaaagaaagagaaagaagaaggaaggagggagggagggaagaaagggaggagggaaggagggaaggaattagagaaagaggagaatgtggtatatgtagatagtttaattttgttaggaatggtgaggaggaatagatgttttaaattagatggcggtacgtgtagatgattaaatcgtttgtaatgtgttattttagtttttttgagagtgaaaatttatgtttggggatttttgtggttaaaaggtgggtaaaaaggtagattagaaatttttttttttttagatggagtgttgttttgtcgttcgggttggagtgcggtggtgtagttttgatttattatagttttatttcgttgggtttaggtaattttttaattttagttttttaagtagttgggattgtagttttaataattttttttagattttagttgtaaattaaaggtattgggtttagatgtagtgtttattaattttggttgtataatagaattatttgggtagttgaaaattaaaataaaaaatattgtgtttaggtttaattatattaaaattttaaaattgtatatttttatattgtaaatatatattttattgttgtaagagttataagaaatttttaatggttatcgatggaagtaggttgtttatttgtgtattttttattacgagaaaaataaatttttatttggttaaatagcgtaattatatttgttatatgtagttaaaagtaatttttaattgatagagaggagaagttattagaggggtgtttatagggagttagaatggtttttggaatagtttagtgggtggattgagagtagatggggtgagatttaaggtagagaggttatttgggagataggataagagtttatttaaggttattattggaagaaagttgggagattacggaaatgtaattataagtttagttatttattagaggtgtatggtgagagagggaaggtaagggtagtttttaggtttttagtttttttggtgttgtttattaaggaaagtaggtttaaggataaagggtttaatttaggatagggtgtatttgaagtgtttgaagaatttataagtgttaggttggaattatttttttggatatgggtttaagttttaggattatttttaagtttggattttattttagaattaatatatagtttatttaacgtttttgttttattttgttttgtttttttgatataagattttattttgttatttaggttggagtgtaacggtatgatttcggtttattgtattttcgattttttggatttaggtgatttttttattttagtttttttagtagttggtgtgttcggaattggtgggtttttggttttattgattttaagaatgaagtcgtggattttcgcggtgagtgttatagtttttaaaggtggcgtgttcggagtttgttttttttgatgtttagatgtgttcggagttttttttttttggtgggtttgtggtttcgttggtttaggagtgaagttgtagattttcgcggtgagtgttatagtttttaaggtagcgcgttttaagttgtttatttttttcggggggttcgtggttttattggttttagtagtgaagttgtagattttcgtggtgagtgttatagtttataaaggtagtgtggatttaaagagtgagtagtagtaagatttattgtaaagaaagataaagtttttatagtatggaaggggatttaagtagtttgttattgttggtttaggtagtttgtttttatttttttatttggttttatttatattttgttgattggtagagtcgagtggtttgttttgatagggcgttgattggtgtgtttataatttttgagttagatataaaggttttttatttttttattagagtagttagatatagagtgtcgattcgtgtatttataaattttgagttagata

SEQ ID NO: 159 - DNA, 1136 bp, Artificial Sequence
  chemically treated genomic DNA (Homo sapiens)
gaatttaaattatggtttattaaattttaaagttggagtttttttatagttttaggatttagaatagggattattattatttttgttgttgatatgaggaaattgtggtttagggaggttaagtgatttgttaaagtttgtatatatggaaagtagtagaattaggatgtaaatatatttttttattattaatattaatatttattttgttaataaaataatgagggggtttgagtaaataattttaacggttaattttattttttaattgagatattttttttttttttttttttttgagatagggtttggttttttgttatttaggttggaatgtagtggtgtttttagttttttaagtagttaggattataggttatatgttattatgtttagttaatttttgtattttttgtagaaatagggttttgttatattgttaaggttgtttttaaatttttgggtttaagtagtttttttgttttagttttttaaagtaagagaagttggaaggaaaatgggtgaaaataaagaagtttttagttatattgtagtttgtttatgttttttgttttgggatgtcgtagtggttgttttagttttgtttttttagttttagttttttttttagtgaaggagagaaaaagtgatttaataaagtgaggattgttagtttttggattttggatttttgagattttatgatttattttttagtgtgtttattagtgagagtggtttttaagggagagtgtgaagtatacgtggtagtgttttatattatatttgttgagtttaaattatgggaggttttttttttagattttgtattttgaaagttgcgtatttgagagttgcggtttggttgtagggatatatttagggggaggagttgtaatcgtgtttggggttttagttaggttggtcggagtttttgttttcgttgttttgttgtttgttcggggtattaatatggtttagaagcgttttgtttgtattttgaagtttgagtgtgtttagtagttgttggtttgtttttaggaggttaagaagttagtttattgtttttatagttatttttttgtgggggttgttttgtttatttaggaggggagaatttttaaaggtaaaggtgg

SEQ ID NO: 160 - DNA, 1136 bp, Artificial Sequence
  chemically treated genomic DNA (Homo sapiens)
ttatttttatttttgaagattttttttttttgggtgagtagggtagtttttataggaaagtgattgtaggggtagtaggttgattttttggttttttgggagtaaattagtagttgttggatatatttaggttttagggtgtaggtaggacgtttttgggttatgttggtatttcgggtaggtagtagagtagcggaaataggagtttcggttagtttggttggggttttagatacgattgtagtttttttttttgggtgtgtttttgtagttagatcgtagtttttaggtacgtagtttttaggatgtagggtttaggagaggagttttttatggtttggatttagtaggtgtggtgtaagatattgttacgtgtgttttatatttttttttaggaattatttttattggtggatatattgaggggtgggttatgagattttaaaggtttaaggtttaagggttgatagtttttattttgttaaattatttttttttttttttattgagggaagggttgaggttgaaagggtagggttggggtagttattgcggtattttaaggtaggaggtatgaataagttgtagtataattgagaatttttttatttttatttattttttttttaattttttttattttaggaggttgaggtaggaggattgtttgagtttaggagtttgagaatagttttggtaatatggtaaaattttgtttttataaaaaatataaaaattagttgggtatggtggtatgtggtttgtagttttagttatttgggaagttgagggtattattgtattttagtttgggtgatagagagttagattttgttttaaaaaaaaaaaaaaaaaaaaagtattttaattggagggtggagttaatcgttgagattatttatttaggtttttttattgttttgttggtaaaatagatattggtgttggtggtaaagaaatgtgtttgtattttggttttattattttttatgtgtataagttttggtaggttatttgatttttttgaattatagtttttttatgttaatagtagagatagtaataatttttgttttagattttgagattgtagaagggttttagttttggagtttagtaaattatggtttgaattt

SEQ ID NO: 161 - DNA, 2114 bp, Artificial Sequence
  chemically treated genomic DNA (Homo sapiens)
gaattttgtattttgtgaaattattttttaaaagtgaatataaatatttttttaggtaaataaaaattgaggggattcgttgttaatagaattgatttgttagaaatgttttttaaaagttttgtagagagaaagaaaatgatataggttagtaattttgagttatataaagaaaggaagagtattttagaaggaattagtaaagagaaaatgaagttttttatttttttttaattttaattgatttaagagtttgttaaaataaaataataataataaaaataggtcgggcgcggtgatttattatatttgtaattttagtattttgggaggtcgaggtgggtagattatttgaggttaggagttcgagattagtttggttaatacggtgaaatttcgtttttattaaaaatataaaaattagttgggcgtggtggtggtatatgtttgtaattttagttatttgggaggttgaggcgggagaattgtttgaattcgggagatagaggtcgtagtgagtcgagattatattattgtattttagtttgggcgatagagtgagattttgttttaaaaataaataaataaataaataaataaataataaaaataaataaataaaagttagaaagtgtatttgatgattatagttatgtatatgtgaaatgaaggatagtaatgatgtaagggatgggtgagtggaattaaaaatattttattatttatttattttgagatggagttttgttttgttgtttaggttggagtgtagtgggatgattttaatttattgtaattttcgtttttttgatttaagtatttattttgatttagtttgttgagaagtcgagattataggtatgcgttattatatttggttaattttgtatttttagtagagatagggttttgttatgttggttaggttggtttcgaatttttgattttaggtgatttatttgtattagttttttaaagtgttgggatgatagatatgagttattatgtttagtttaagaatatttgatgattataaagtgtttgtattatttttgaagttgtatagtgttatatgaaggtggagttggagagatgagttttaagcgtatattgtaaattttagggtaattattaaagaagtgagatttagtttttagaaaaaaaaaaaaaaaaggaaattagttattaagttacgaaaagaaatggaggaattttaaacgtatattattaattgagatacgttattttgaaaaggttataaacggtgttattttaattatataatattttggaaaaggttaaagtatggtgatgataaaaaagatcggagatgttagggattggggtaggagggatgagtaggtagagtataggttttttttttttttttttaagatagtgaaaatatttttaggattttgtaaggagggatataaattatatatatttgttaaaatttatagtatgttgattattaggaggagattttatgtgattttaggattttggttgataataacgtatcgagattttttatatggaattagtgcgtttttgtggtggagggtgtatttgtgttagggtagggggtacgtggatattttttgtagtttttgattaattttgtaatgaattaaatttgtggtataaaaataaagtttattaaaagaatttaaggtttttttttattttacgataagataaagtttttatttattttattttttttagttttggagaaaggagaggttaggttttattattttttattagtatggatttttagtttagattttacgtttttttttagtatttttagattagtaggatttgtagtaatggggaattaggtatttgattttttttttatttatttttggttggggtttttagttttgattttcgttttgagagttttaggtaggtttagaggttagtttttttatgacgtgatatgtttttagagtaggtttttgggtgagataaaaggatttgggttgaatagggtggagggagtattggaatggtatttagggtaaaggtagaggtgtgcgtggtagcgttttggttgtttttgtaaagggtacgggtattgggtattagagtcgttcggg

SEQ ID NO: 162 - DNA, 2114 bp, Artificial Sequence
  chemically treated genomic DNA (Homo sapiens)
ttcgagcggttttagtgtttagtgttcgtgttttttgtagggatagttagggcgttgttacgtatatttttgtttttgttttgagtgttattttaatgttttttttattttgtttagtttaaatttttttattttatttaggaatttgttttggaaatatattacgttatgggagaattggtttttggatttgtttgagatttttagagcgaaggttaaggttggaggttttagttaaaggtagatgaaggagaagttaggtgtttaattttttattgttgtaagttttgttggtttgaggatgttgagaaaaggcgtggggtttggattgggggtttatgttggtggaaggtggtgggatttggttttttttttttttagggttgagaggagtaaaatggatggggattttattttatcgtgagatgagagggagttttggatttttttaatagattttatttttatattatagatttagtttattgtaaaattgattaaaaattgtagaaaatgtttacgtattttttgttttgatataggtatattttttattataggagcgtattggttttatgtgaggaatttcgatacgttgttattaattagggttttggagttatatggggtttttttttggtggttaatatgttgtgggttttgataaatgtatgtaatttgtatttttttttgtaggattttaggagtatttttattgttttaaaaagaggaaaagaaaatttgtgttttgtttgtttattttttttgttttagtttttgatattttcgattttttttattattattatgttttggttttttttaaaatgttgtatagttggaatgatatcgtttgtagtttttttaaagtgacgtattttagttagtaatatgcgtttaaggtttttttattttttttcgtggtttgatagttaatttttttttttttttttttttttagaggttgggttttatttttttagtggttgttttagagtttgtaatatacgtttaaaatttatttttttaattttatttttatataatattatatagttttagaggtaatgtaagtattttataattattagatatttttaggttgggtatagtggtttatgtttgttattttagtattttgggaggttgatgtaggtggattatttgaggttaggagttcgagattagtttggttaatatggtaaaattttgtttttattaaaaatataaaattagttaggtgtggtggcgtatgtttgtaatttcggttttttagtaggttgagttaagatgaatgtttgaattaaggaggcggaggttgtagtgagttgagattattttattgtattttaatttgggtagtaaagtaagattttattttaaaataaataaataataagatatttttaattttatttatttattttttgtattattgttgttttttattttatatatatataattatgattattaaatatattttttggtttttatttatttatttttattatttatttatttatttatttatttatttttgagatagagttttattttgtcgtttaggttagagtgtaatggtgtgatttcggtttattgcgatttttgtttttcgggtttaagtaattttttcgttttagttttttaagtagttgggattataggtatgtgttattattacgtttagttaatttttgtatttttagtagagacggggttttatcgtgttggttaggttagtttcgaatttttgattttaggtgatttgtttatttcggttttttaaagtgttgggattataggtgtggtgagttatcgcgttcggtttatttttattgttgttgttttgttttagtaaatttttagattaattaagattaagaaaaaataaaagattttattttttttttattgattttttttgaaatgttttttttttttttatgtagtttagggttgttgatttgtattattttttttttttttgtagaatttttaaaaaatatttttggtaagttagttttattggtagcgaatttttttaatttttatttatttgagaaaatatttatgtttatttttgaaggataattttataggatgtagaattt

SEQ ID NO: 163 - DNA, 3231 bp, Artificial Sequence
  chemically treated genomic DNA (Homo sapiens)
gtttttgtttatgtagatgacgagttagtgggtgtagtatattagtatggtatatgtatacgtatgtaattaatttgataatgtgtatatgtattttaaaatttaaagtataataataaaaataaaataaattaaaataaaatatatttttattttgttggatttttaagtgatgtttttgtcggggatttttatgatatatttttgaggaagatgagaaacgaggttttttaattttgttaaatattttagatatataaatagtttttattttttatggtagtatggggttgtaaaaatgattatgtaagttaaaatcgtgtaaagtaattttaaaaattaagagaaaaattaaaattgttttgtgatttttaaaatttgttgttaaagtattagaaatttttattataggttataagtgtgtaggggaataaataaataaaaatagtaaaatattttaggatatagtaatttgaaatattagaaataatgtaatattttaagtgttttttttttttgtgaaaataaatttattaagaggttttttaaaagtgtttgtttttttttttttgtataatttacgatattgagggaatattttttttatgttagtgaattgttatagttttttataaatttgtattagtttgtagtattttatttttttgtttttagtgttgtgaaatatttttggaagtttttataatgtgaagttttttgttgggattattttttgtgggatatttttattttttttgttgtaattattttttttatttatgttttgaataatggttttaggttttattaatataaatcgaaattttaagggttttaattgttagaaagttatatagaatttatttagaatgatgttaaattttattttagaaatttaaaattttattttgttaaaaatagtttgttattaataaaggaattagatgataatagatataaggttgattttttagtttcgatttatatatattaaaaaaaaaataattataaaattgtttaatataagtataatgtgtttttaggagagaattttaaaggatttttttagtgtatttttagtgttttgtatttaagtattaatgattatttaaatggtagaataatataaaatgatgaaataattggataaatttaattatgttgtaaaaattttgtagttgatagaaattagtttttggattttaagattttatatagattagaggagaaatataatgatatattttttaagaatttgatgaaagttatggtttttttttattagaatgtgtcgattataatattttatgtagtgttttaaggaatatatagagtttttaatatttagttagaagttttggttgtgaatttagaattttattataggtgaaatttagtataagtttgattgagagttattgtaagttatagaaattttaggttttgtttaagtaaaggtaaattttggagtatgttatttgttattgaaaatgtatttaatgatgatttattttttttttattttataagtttgtttaatttatatttttttagttatagattatttattatttttgaaattttgttttgagagtaaagggattataaaatttggttgaaaagatagatttaatggtatgttaaaaaatatagtagaattagtatattagattgtaaattgattgttttgtataggatgttagttgtttttcgaatgaggtttttgagtggtatttgagtttattgttggtggtattttattttgtttgttttttttttttttttttttttttattttttttattttttttttttttattttttttttgtaattttttttttttatattatcgttggtcggtttttagggatattgtttaatttggtttatggtataagagattttagatttttattgaagttattagagatggtttgagtgagtattttgaatttattagataattgatggaaggttttgagaagattttaacgatgtttaagaaatgtgtttttattgtagaaatttattattttgattaaaaaagttattttggttaaaaaggggagttgggagattgtttttttgttttgaaattgatttggttttaagggaagaagattgtttaaataaaatttgttgatgaagttataaaatgattttatttttggaatgagttttatttttttataatttggtaagaaatttggtttttaattgggaatgtacgttattttatttatttaagggtaagatgataaggttttattagattaagcgtttaaaggaatttgagattttattaaggttagaaatgttgtaatttaagttaaaagattttttttgggtttttttgttttgatttgtaattataaattagttttgtttaaatgtttgattatattataaaatagtaagtgaatttgtattgtatagtattttttgaagtaataggagttatagatgaattttttaggggattttgtaatttttttgtttttttgatttttataggattttaaattgttttttttgaggttaaggaatataagatggttttggaaatgttgaattcgatatattataatattattagtatcgtgtttgaagttatgtttgttgttattatgttagttttgttttttattggttttttttttttggtgtggaattatgagggtatatttttaatattaggtaagttagttatttatttttgtatttaaggagattatttatttgggattttggtttatgatggtaaagaaaattttgtaaaaggataaaaagtaaatttggaaagatttttgaagattatgtttgtgttagtaaatgaggatttgggagaaaatttttagattaattatttgtatattttaaatgaaagtatttaaaaaatattttagataaatttttttattttgtgttgtgttttcgtaaagtagatttggtataagtattttttaaaataagtttaagatggggtggagtaaagtaaaattttagggttttttggttaatttttaaaaaatagattgtaattttgttttgaaggtgaaaatgtttttggaatattttttttattgtttttttttttttttttattttgttttttttatgttttttttttgttttgtatttattttttttttttattttatttattatttttttttatttttgggaatgtggtgatagtggtttttattttttttttattgtttggattt

SEQ ID NO: 164 - DNA, 3231 bp, Artificial Sequence
  chemically treated genomic DNA (Homo sapiens)
ggatttagatagtgggagaaaaatggggattattattattatatttttaagaataagagaaaatgatgagtggaataaagagaagggataaatataagataaagagggggtatggaggaaataaagtgaaagggagaagaaaagtagtgaagaagatgttttagagatatttttatttttagagtaaaattgtaatttattttttaaaagttaattagaaaattttggaattttattttattttattttattttgagtttgttttaaagggtatttgtgttaagtttattttacgaaagtatagtatagagtggaagggtttatttaagatattttttaagtgtttttatttaaaatgtgtagataattggtttgaaaatttttttttaagtttttatttgttaatatagatatagtttttagagatttttttaggtttgttttttgtttttttgtaaaattttttttattattatggattaaaattttaagtaaataatttttttagatatagaaataaatgattgatttatttggtattgaggatgtgtttttataattttatattaagagaaaaaggttagtgaggagtaggattggtatggtggtagtaggtatggttttaggtacgatgttggtgatgttataatgtatcgggtttagtatttttaaaattattttgtgttttttgattttagagggggtaatttagagttttgtggaaattaaagggatagaaaaattatagaattttttaaaaggtttatttatagtttttgttgttttagagggtgttgtatagtatagatttatttattgttttataatgtgattagatatttaggtaagattaatttatggttataagttaaaataaggaagtttaagaaagattttttggtttgaattgtagtatttttgattttggtagagttttaggtttttttagacgtttggtttgatagaattttattattttgtttttgagtgggtagagtgacgtgtatttttaattgaaagttaaattttttgttaaattataagaaaataaagtttattttagaggtggagttattttgtgattttattagtaggttttgtttaggtaattttttttttttgaagttaaattaattttaaaataaaaaggtaattttttaatttttttttttgattaaaatgatttttttgattaaaatagtaagtttttatagtaagaatatattttttgggtatcgttgaggtttttttagagttttttattagttgtttaatgaatttaaagtgtttatttaggttatttttagtgattttaatgaagatttaaaattttttgtattatgggttagattaaatagtatttttagggatcggttaacggtagtgtggaaaaaaagaattgtagaggaagaataagggagaagagaatgaaaggaatggggaaggaggaagaaagagagaataggtagaataggatgttattagtaataggtttaggtgttatttaggaattttattcgaagagtagttaatattttgtgtaagataattaatttatagtttgatgtgttggttttgttgtgttttttaatatgttattgaatttgtttttttagttaggttttgtaatttttttatttttagaatagagttttagggatggtaggtagtttgtagttgaagaggtgtaggttgaataaatttgtagagtgaggaaagagtgagttattattaaatgtatttttagtggtagatgatatattttaaggtttgtttttatttagatagggtttagagtttttgtgatttgtaatggtttttaattagatttgtgttgggttttatttgtaataaaattttagatttatagttagggtttttaattggatattgggggttttgtgtattttttgaaatattgtataaaatattgtaatcggtatattttagtggagaaaggttataatttttattagatttttaaggagtatgttattatattttttttttgatttatatgagattttaaagtttaaagattgatttttgttaattataaaatttttataatatagttgaatttatttagttgttttattattttatgttattttattatttaaataattattaatgtttgggtgtagggtattgaaaatgtattggaaaggttttttgagatttttttttgaaagtatattgtgtttatgttgagtagttttgtggttgttttttttttaatatatataagtcgaaattaaaaagttagttttgtgtttgttattatttggtttttttgttgatgataagttatttttaatagggtgaggttttaaatttttagagtggaatttgatattattttgagtaagttttatgtgattttttgatagttgggatttttgaagtttcgatttatattgatgaaatttgaaattattgtttaaagtataaatgaggaaagtggttgtaataaaaaggatgaagatgttttataggaagtgattttagtaaaaaattttatattataggaatttttagaggtattttataatattgaaagtaaagagataagatgttgtaagttgatgtaaatttataaaggattatggtaatttattggtatagaaaagatgtttttttagtatcgtaagttatgtaaagagaagaaggtaagtatttttaaaaaattttttagtaagtttatttttataaagaaagaaaatatttaaaatgttgtattgtttttaatgttttaaattattgtgttttaaaatattttattatttttgtttgtttgtttttttatatatttataatttatggtaagagtttttaatgttttgataataaattttaaaggttatagaatagttttaattttttttttgatttttaggattgttttgtacggttttagtttgtatggttatttttatagttttatattgttatgaaaagtgaggattgtttgtgtgtttaaaatgtttaatagagttaagaagtttcgttttttattttttttaaaagtatgttataaagattttcgataagagtattatttaaaaatttagtagggtaagaatatattttattttagtttattttatttttattattatattttaagttttagggtatatgtgtatattgttaggttagttatatacgtatatatgtgttatgttggtgtgttgtatttattaattcgttatttgtatgggtaaggat

SEQ ID NO: 165 - DNA, 1668 bp, Artificial Sequence
  chemically treated genomic DNA (Homo sapiens)
gattttatttttaaggaaaatgatttagtgtttgagaaagtattatagtgttgtagttttgtagatttttagtttagttaggttcgagttgttttatgtaggaagaattaggtatatagatattggagagtgagtggagtagaatttattaagtgaaaggaaaatttttagtaaagagagaggttttgaaagtaggttgtagattgttattttatagttgaatattaggatttttatagaaaagttgatgaggttgggatatttatttgtataaggcgtgaatttttggtgtttttattttttttttttattgcgcgtgtgggtttttagtttaagttattttatattgatttatttttttttttgcgtatgtgttaaaggtaggaattttttattgtgggtatatttaggtaagttttttgtgtaagtttttttatttgtataaaatatttagtgtaagtatttggggtttttgtggattgggtaatgatttggaagggttggaggttttttggggattttttttttattgtttgtttaatgtaagttggttaattttttttaataggataaatattattttatgtataaggaatataatatatagattgtttttaaagttatatttttaattgtttattaatttaaaaatttaaaattttgaataattttttgatgaaataatttattttattgttttttaattttggttgtatagtggaattatttgggttgtttgaaaaaatttaggtttagttaggtacggtggtttatgtttgtaattttagtatttagggagattagtttggttaatatggtgaaattttgtttttgttaaaaatataaaattatttgggcgtagttgtgtatttttgtaattttagttacgttagaagttgaggtagaatcgttcgaatttaggaagtggaggttgtagtgagttgagattttgttattgtattttagtttgggtaataagagcgaaattttattttaaggaaaaataataataataataataaaattttgggttttgttttagattagttaaattagaatttttagggtggggtatcggaaagaataagaaaaaagaatattttatttttattttttttagtgagttaatgtttatttaaaagagagattaaagtgttttttgttgattagttatagttagagttagaattataggtggattagtagggagtgttataaaagttttgaagtgaaagttcgtagttgttttattaagaagagaagtttttaatggatttagttgtggttttggtgttttgttttttttgtttgtttttttttttattttggaggtagagttttggaagagggaggttttcgtttggttttatttttttttcgattattggaaatattttgtagttagatgttaaggatatgagtaaatttttaattaatgtaagtatgttttatgtttttttagtaatgtataaggtgtatttaattttataatttttaaagttttattttattttaaagtgataaatgataattgtatatattaatggggtataatattatattttgatatatgtatagattgtgaattgattatattagggtaattagtatatttattattttaaatatttgttatttttttgtagtgagaatatttaaaattttttt

SEQ ID NO: 166 - DNA, 1668 bp, Artificial Sequence
  chemically treated genomic DNA (Homo sapiens)
aagaggattttaaatgtttttattataaagaaatgataaatatttgagatgatggatatgttaattattttgatatgattaatttataatttatatatgtattaaaatgtaatattgtattttattaatatatataattattatttattattttaaaatgaaataaaattttaagaattgtgaggttaaatatattttgtatattattggaggaatataaagtatatttatattggttaaggatttgtttatgtttttaatatttaattgtaggatatttttaataatcgggagaggagtggggttagacgggagttttttttttttagagttttgtttttagagtgaaaggagaaataaataggagagatagagtattagagttatagttggatttattgaaggtttttttttttagtaagataattgcgggtttttattttaaggtttttataatattttttattaatttatttgtgattttgattttgattgtgattagttagtaaaaagtattttaattttttttttgaatgaatattggtttattgaagaagataaaaataaggtgttttttttttttgtttttttcggtgttttattttggagattttggtttaattagtttgaagtagagtttaggattttgttgttgttgttgttgtttttttttgagatggagtttcgtttttgttgtttaggttggagtgtaatggtaagattttaatttattgtagtttttattttttggattcgaacgattttgttttagtttttggcgtggttgggattataggaatgtataattacgtttaggtgattttgtatttttagtagagatagggttttattatgttggttaggttggtttttttaagtgttgggattataggtatgagttatcgtgtttggttaggtttaggtttttttaaatagtttaggtggttttattgtgtagttaaaattgagaaataatgaaataaattattttattaaaaaattatttaaaattttggatttttagattgatgagtagttggaaatatgattttgagggtaatttgtgtattatattttttgtatataaaataatgtttattttattgagaggagttagttagtttgtattaggtaggtagtaagggaagggtttttagagaatttttaatttttttaggttattgtttaatttataaaaattttaagtatttatattagatgttttgtgtagataagggaatttgtatagggagtttgtttaaatatgtttatagtgaaaaatttttatttttaatatatgcgtaggaagggaaataaattaatatggagtggtttagattaagagtttatacgcgtaatggaaggaaggggtggaaatattaggaatttacgttttatgtaaataagtattttagttttattagtttttttataaaagttttggtatttaattgtgaagtggtaatttgtaatttgtttttagggtttttttttttgttgagagttttttttttatttaataaattttattttatttattttttagtgtttgtgtgtttaattttttttgtataagataattcggatttagttgagttaaggatttgtaagattgtaatattataatgtttttttaaatattagattattttttttgaaaatgagatt

SEQ ID NO: 167 - DNA, 6193 bp, Artificial Sequence
  chemically treated genomic DNA (Homo sapiens)
ggttaagagaaattagttaggaaaaattagatagatttttatattaaagaagaggtttttattttttttttttttttttttattggtgtagttacgaagttttttaggttgtttttgtttaaaatataaaagaaaattttgttttttttgtatttttataaatttgttgcggtagattttttagtcgatggtggttttgggtttttttgagtgttatatgttttagaaagttgttggttgatttttttttgtttggggtttggggaaagggtttggattgtgaaaagaaatgtggtttttttttatttttaagagagatggaattaatgatggatggattttggagggaatttttttagtcgatttttattgggttgatagattttgttgattataggggaacgatgtttttttttttttttatgattagatataaatttagtattttaatggaagaaaaatgaggggaattttaattatgatttattaaagataatttttattatatttttttttatgataagtgatattttagatgtaaaagtaaaaattttattatgttttttttttttttgttggtttaatattgaggttttaaaatttgaggtttttgtgtttgatggaatttttgtaatatatatttgtgtattatataaagatattattttgttttttttatgtatttttattttagttgtttattaagaatgataagtacgtttttttaatatgttagtgaataacgtttttttattttggggaggagttcggtgggatagtagaagtaaatttttgtttgttaattgaattggtcgaggttttgcggggagtgtggggtgggacgtgaagtggtagttttttagtgataaggttattatgtgttatacgtatgcgttgtttttttagcgttagtttcgttttcgtcgtagcgaggcgggtaggtttcgttcgcgcgtattacgttttgacgttagcgtcgcgcgtagtagtgacgaaatcggttggtttatattggcgcggtttagacggtagaggtttttgcggcgcggttttcggagatacgcggcggtgttttgtgttggttatggtcgattatttgattagtgggggtacgttttacgtgttagacgacggatttatagtatagtagttttttaattgcggagacggttttatttataagtgcgggtttatggggtttatttgggcgaagagaggggcggtatttggggaaaaggttagatgggggttttcgagagtcgttttgggcgtgggcgtgggggataggtttcgggaattggttatttattttcggggtttattttgagatatttggagcggtgtttggggtacggagaagtattttagtagtgtttggaattttaggtcggagattttatgttttagatatatggaattgttagggtgttaggagtattgatgatagttcggtggtagaaaaggttttttgtatttatttttattttgtgttgtgtttgtgatatatagattttgttagtgttattttttgttgatatgcgttacgggttgattggtatatggggatggagttttatgttgttttaagttgagagttttatttttaatttatttttttttttcgtagtgatttttttattttttttgggtatatcgattttattgtagattaggtggtgagtatgattaggaattgggttttgaatataaggtgagttaaggtgttattattatttggtttttgggttaatttattagattgggtttgggggtggattttataggattatgttgtttgttagtatgtaggttatataaaagtgttttttgtgggggatttagtaatattttgaggtgtaagggatgtttttttatattggttgacgtttgtttttttaggatttgatttttgttttgattaagaaaattatttttaagattttattggtttttttttttatggatatagttatagaggttgggatggttatagtaatggcggtgagttttatggggtgtgggggaaggagtaaggattttatcgtttttttttaaaggtatttagttttgttttttgttatttagtagtagtttttttttattttgtagtttataggcggtattggttttatttattataattgtatatttgaattttaggttaatgaagttcggaaagtgaaggttagaagggtaacgattattagtaagcgtttttgggaattgtattgaggtggggtggggtgggagtaggggtttattttaatttagtattttttttttttattatggggtttagttattgagaagattttgagattttgttttttaaagtagtagtaatagattaggtgtatagtgtttttagtttatttatgtttttaagatgtgttggtgtgatttggttttgtggtattgttaaagggatcgataagtagagattttatgttttagattaagagtttgatgaaagtagtttaaagatgcgatgtttttttttattatttttttttagaaatatgaatagggatttattatagattttgtggtttttagttttaaggatcgcgtgcgggatgtttttgaggttaaggttcggtatggtttttgcggtattttaattatagatataggtcggatggggagtcgtttggtgggtattattttttttagggatattgatttttttaaagaggaggaatatgattgttttttggaagaggtgggtgttattggtagagtagatttaagttttagtagtttaggttgaagataaggggtttttgttgtttaagatatttttgatagttttttttttttgggaaaggagtgttaaattaagtttttgatttttttattgggtttttgtattttttttttttagaggtttttaaattgtttaaatgtttgttagtatttatgttttgtttttttaaatttttaaggtaggggtagtgtttgaggtttgttttgatttttttgttattgtttttgtgttgttttttttattttatagtgtaagagggtgttttttgtgttatgttgttttttttatttattttttatttaatattatattgttaagaattattgggattttttgaggaagggtgttttgggtgtgaatgtatgaacgtggtggtttatagaattttatttttgtaattttagtattttgggagatttgaggtaggtaaattatgaggttaggagtttgagattagtttggttaatatggtgaaatttcgtttttattaaaaatataaaaaattagttgggtgtggtggcgcgtgtttttgagtttagttatttgggaaggaaagaaaagagttaattggttatagtcgatgattggtttttttttatattttattttttacgtagataatgataaagagggaagatttggtggtagtttttgtaggtattatattgaaggaggtaaatgaaattttgtagcgtagtaagaagggtaagttttagagttgggaaagggtttggaattaatgtttagggttttgatttatgttttgttttgattataggaaagttgtttattgtaaatgaagatgatgagtttgtggttattattgttcggatagatttgaagaagaatcgggattatttattagtttttaaagatgttaagaaatagttgttgtgtggggtagttattggtatttatgaggatgataagtataggttggatttgttcgtttaggttggtgtggatgtagtggttttgggtgagtttgttatataggtgggttggggtaataggggtagttgttatatgatagtttgagatttattttttgttttagattttttttagggaaattttattttttagattaatatgattaagtatattaaagataaatattttaatttttaagttattggaggtaatggtaaggtaagattgtgttttgaaggatgtgtggtgggagtgggtaagttgggtttttattttaatttttatatgagtattttttttttttttattatagtggttattgttgtttaggttaagaattttattgatgtaggtgtggatgttttgcgggtgggtatgggaagtggttttatttgtattacgtaggaaggtaagaatatattttgatagggtttatagagattttagttttaggttttatatattttggaattaagtatttttatggggataatagagttttttaataggggtaattttggggttaaattggttttttggatgggtgatatggttggaagtaagataaggttttgttatttattatttgttatttttttgtttagtttggtttttttgtttttgttttgtattttttttaaattttggtttgtttgttttatttagtggtttttaagatttttttagatataaagttttatagttttaaatgtttttttattgttacgggttgttatagtaagtttagttcggtttattggttcggtttagttgtttattgttcggttgtttggttgacgtagttgtagttttcggggtttgtggtgttgatgggtgggtaaggttaattgatatatagattatggtttgggggtggtgtttaagaatatagtttttttttttttttggggtgttgatagggtaggatttttttttttaggtaggattttttttgtttatattttttgtagtaggtatagtttagggattaatttttttgtgtggtttttgtttttttatataattattgtttgttttatataattatagtttgtttttttatataattattgtttttattttgtttgagttgtttattatttagggaggaagggttgggtttgattttagtgtttttggggattaattgtacggtgatttttgttttatttgatattagttggacggggttttttcggttgttaagattgtatgtgtttgaggttgttttgggtattgtatatatgtacgtgtatatgtgggggtgagtagaggttagtatagttgtttgtattatttaaggtagatgtggtagtagttattttagatacgtttgttttttagttaagttgtagttttgatgtagatgtagttaaaagtttttgggttttaaatatggttatagggtttattgttcgtttttattaattttatttatttatgtgtttttttattttaatagtgttggtttgtgggcggttttaagtaatagtagtgtataaggtgttagagtatgtacggcgttttggtgtttcggttattgttgatggaggaatttaaaatgtgggttatattgcgaaagttttggtttttggggtttttatagttatgatgggtttttttttggttgttattattgaggtttttggtgaatatttttttttcgatgggattcggttaaagaaatatcgcggtatgggttttttcgatgttatggataagtattttagtagttagaatagatattttaggtgggataggtaagttagttattttattttaattttgtattgatagttttatttttgttgtgattttgttcgtgtttttgtttttttttgtagtgaagttgataaaattaaagtggtttagggagtgtttggtgttgtgtaggataaagggttaatttataaatttgttttttatttgattgttggtatttaatatttatgttaggatattggtgttaagagtttgatttaagttcggtgagtttggggagttgggatatgggtagaggggttggtttagggttagttatttatatttgatttttgtttttttttagagttatgatgtattttggggagtttaagtttgagaagagaacgtttttagtttaggtggaaggtggcgtttatagtttttattcgtaagttattttgtttttggtggggtttttgttatattttatgtttttttttttttgtttttattttataggtggtttttttgtttgtaggtatgagaagcggtttttttgaaaagggatttagtatattttttcggttttttttttaataaaagtttagaaagaaaaaagtgatgtttgattttttaatagataggtggggttttgtagttgttattattatagatgtatataaaaatagtatttttatttttagggggagttttaggtttcgagataaatgtgttttatggatttggaagcgggtagtttaggtttaaaaagtttttttagtttttata

SEQ ID NO: 168 - DNA, 6193 bp, Artificial Sequence
  chemically treated genomic DNA (Homo sapiens)
tgtgagagttagaggaattttttggatttgaattattcgtttttaggtttatggagtatatttatttcggggtttgaggttttttttggaaatgagggtgttgtttttgtgtgtatttgtggtagtggtagttatagagttttatttgtttgttgaaagattaggtattatttttttttttttaaatttttattgaaaaaaaaatcgaggaggtgtgttggatttttttttagaaaagtcgttttttatatttgtaggtagaaggattatttgtgaggtgagggtaggagaaaggaggtatgaggtatggtagaggttttattaaggatagggtgatttacgaatggaggttatggacgttattttttatttgggttgaggacgttttttttttaaatttaagttttttagagtatattatggttttgaagaagggtagaggttaaatgtgggtagttggttttggattagtttttttatttatgttttagttttttaagtttatcggatttgggttaagtttttggtattaatgttttggtatgagtgttggatgttagtaattaggtaagggataaatttgtggattgattttttgttttgtatagtattagatattttttgggttattttgattttgttagttttattgtagggagaggtagagatacgggtaaggttatagtagagatgagattgttagtgtaggattagggtggggtaattggtttgtttgttttatttgaaatatttgttttggttgttgaggtgtttgtttatggtatcgagagaatttatatcgcgatatttttttagtcggattttatcggaaaagaagtatttattaggggttttagtggtggtagttaggagagagtttattatgattgtggaggttttaagggttaaggttttcgtaatatgatttatattttggatttttttattagtaatgatcggaatattaaagcgtcgtgtatattttgatattttgtatattgttgttgtttggggtcgtttataggttagtattgttgagatggaggaatatatgggtggatagggttaatggggacgggtagtggattttgtggttatatttaggatttaggagtttttggttatatttgtattaggattgtagtttggttgaggaatagacgtgtttgggatggttgttgttatatttgttttaaatagtataaatagttgtgttgatttttatttatttttatatgtgtacgtgtatgtgtgtagtgtttagggtagttttaggtatatgtagttttagtagtcgggaaagtttcgtttagttggtattagatggggtaggagttatcgtgtagttagtttttagaggtattgaggttaggtttagttttttttttttgaatggtgggtagtttaggtaagataagggtagtggttgtgtaggagagtaggttgtggttgtgtggagtaggtagtggttgtgtgggagagtaaggattatataaaggagttggtttttgaattatgtttgttgtagaagatgtgggtagaaaaggttttgtttagggaagaaggttttgttttattagtattttagaaggaagagggagttatgtttttgagtattatttttaaattatggtttgtgtattagttggttttgtttatttattagtattataaatttcgggagttatagttacgttaattaagtagtcgggtagtgggtagttgggtcgggttagtgggtcgggttggatttattatagtaattcgtgatagtagaagggtatttggggttgtgggattttatgtttggagggattttgggagttattaaataaaataaatagattagagtttagagaaggtgtagagtaggagtaagaaggttaggttaggtaagggagtggtaggtgatggatgataagattttgttttgtttttagttatgttatttatttaagaggttaatttggttttagggttgtttttattggagggttttattgtttttataagagtgtttggttttaaggtatgtggggtttgaaattggggtttttgtgggttttattaaagtatatttttatttttttgcgtaatgtagatggagttattttttatgtttattcgtagggtatttatatttgtattaatgaggtttttggtttgggtagtagtgattattatggtgaaggaaaggaaaatgtttatgtgaaggttaaggtgggagtttagtttatttatttttattatatattttttagggtataattttgttttattattgtttttaatgatttggagattagggtatttgtttttgatgtatttgattatattgatttggaagatggaatttttttgggaagagtttaggataagaagtaagttttagattgttatgtggtagttgtttttattgttttaatttatttgtgtagtaggtttatttaaaattattatatttatattagtttgggcgagtaagtttagtttatatttgttatttttatgagtgttaatggttgttttatatagtagttgttttttggtatttttggaggttagtgggtagtttcgatttttttttaggtttgttcgggtaatgatggttataagtttattatttttatttataatgggtaatttttttgtggttagggtaggatatgaattaggattttaggtattagttttaggtttttttttagttttaggatttattttttttgttgcgttgtagaattttatttgttttttttagtgtgatgtttgtaggggttattattaagttttttttttttgttattatttacgtgggaggtgagatgtgaagaagggttagttatcgattatgattagttaattttttttttttttttttaagtagttgagtttagaggtacgcgttattatatttaattaattttttgtatttttagtagagacggggttttattatgttggttaggttggttttaaatttttaattttatgatttgtttgttttaagttttttaaagtattgagattataggggtgaagttttatggattattacgtttatatatttatatttaaaatatttttttttaagggattttaataatttttagtagtatggtattgagtgagggatgagtagaaaggataatatggtatagggagtatttttttatattatggaataaggaggataatataggaataatggtaagaaaattagggtagattttaagtattgtttttattttaggggtttaaaagaataaagtatgaatattagtaagtatttgggtagtttgaaagtttttggaggggaaggatgtaggaatttaataaaggagttagaaatttggtttgatattttttttttagagagaagaggttattagagatgttttagataatagaagttttttgtttttaatttgggttgttagagtttggatttattttgttagtggtatttattttttttaagaaatagttatgttttttttttttgagaaaattaatgtttttggaggagatgatgtttattaagcggttttttattcggtttgtgtttgtgattgggatatcgtagaaattatgtcgggttttggttttaaaaatatttcgtacgcgatttttggggttgaggattatagggtttgtgatgaatttttgtttatatttttggaaagggatggtgagaaagggtatcgtatttttgaattatttttattaggtttttgatttgaagtatggggtttttgtttatcgatttttttggtagtgttataagattaaattatattaatatattttagagatatgggtaggttggaggtattgtatatttggtttattgttgttgttttaagaaatagaattttagggtttttttagtaattgaattttatggtgggaagaaagaatattaaattagaataaatttttatttttattttattttattttagtgtaatttttaggagcgtttgttaatgatcgttgtttttttgatttttatttttcgaattttattggtttggaatttaggtgtatagttgtggtggatgaagttaatatcgtttgtaagttataggataaaaagagattattattaagtgataagaagtaggattgaatgtttttggggaaaggcgatggagtttttgtttttttttttatattttatggggtttatcgttattgttatggttattttagtttttgtgattgtgtttatgggagaggaaattagtggggttttaagagtgatttttttggttagagtagaagttaggttttgaggagataaacgttaattagtgtgggaaagtattttttatattttaaggtgttattgagttttttataaaaggtatttttgtatgatttgtatgttaataagtaatatgattttataaaatttatttttaagtttaatttggtgagttagtttagagattaggtgatagtagtattttagtttattttatgtttaggatttaatttttgattatatttattatttggtttgtagtgaagtcgatgtatttagggagaatgagaaagttattgcgagggaagggagtgaattgggagtaaagtttttagtttagggtagtatgagattttatttttatgtattaattaattcgtaacgtatgttagtagagagtggtattgatagagtttgtgtgttataggtatagtataaggtggaaatgggtataggggattttttttgttatcgagttgttattagtgtttttggtattttgataattttatgtgtttggagtatggaattttcggtttgagattttaagtattattgagatgttttttcgtattttaagtatcgttttagatgttttaaagtgagtttcggaggtgggtggttaattttcgaaatttgttttttacgtttacgtttaaggcggttttcggaagtttttatttggttttttttttaggtgtcgttttttttttcgtttaggtgagttttataggttcgtatttgtaggtgaggtcgttttcgtagttgaagagttgttgtgttgtgagttcgtcgtttggtacgtaggacgtgtttttattaattaggtagtcggttatggttaatataggatatcgtcgcgtgttttcgaggatcgcgtcgtagagatttttgtcgtttgggtcgcgttaatataaattagtcgatttcgttattgttgcgcgcgacgttgacgttagggcgtagtgcgcgcgggcggaatttattcgtttcgttgcggcgggggcggagttggcgttgaagaaatagcgtatgcgtatagtatatagtggttttgttattgaggagttgttattttacgttttattttatatttttcgtaggatttcggttagtttaattaataggtaagggtttatttttattgttttatcgggtttttttttaaaataaagagacgttgtttattaatatgttgaaaagacgtgtttgttatttttaataaataattagagtaagaatatataagagaaatagagtggtatttttatatgatatataagtgtatgttataagaattttattaggtataggagttttaggttttaaggttttaatgttaggttaataaaaaaaaaaaaggtatggtaaagtttttatttttatatttaaaatgttatttgttataaaggagggtgtaatagaaattgtttttaataaattataattgaagttttttttattttttttttattaagatgttaagtttatgtttgattatgaagaaagaaaagaatatcgtttttttgtggttagtaaagtttgttagtttagtggaagtcggttggggagattttttttagggtttatttattattaattttattttttttgaagatggaaaggggttatatttttttttatagtttaagttttttttttaggttttagataaaaaagagttagttagtaattttttaggatatatgatatttaaggaaatttagagttattatcggttgaggagtttgtcgtagtaggtttatgaagatgtaaagggggtaaagtttttttttatattttaaatagaagtagtttgaaaggtttcgtaattatattaataaaaaaaagaaaaaaaaaaatggaggttttttttttagtgtgaaagtttgtttggttttttttggttggttttttttggtt

SEQ ID NO: 169 - DNA, 1448 bp, Artificial Sequence
  chemically treated genomic DNA (Homo sapiens)
aatattattaaatagtaagaggggttttttttgtagtagagcgatagttatttttttttttttttttttttttttttttttaatggtagaggcggggttttattatgttgtttaggatgtttttagtttttggttttaaataatttttttgtcgtggttttttaaagtgttgggattataggcgtgaatcgcgtttagttatagtttgtaatttttaaggtaagggtgataataggggttaggggtttgataggagataggatttttgtggaaaattgtattaagggttttttcgttatgtgtcgtagtttgaaggtttataaaggattgtatattttatatgagttattttaacgaacgttttttttatcgtattaatagtttacgcggttacgagttttattttatttacggggatatcgaatttgtaagaagtttggtcgtttgttttagtaaaacgagttacggggtttagcggtttaatttttaggttgtagggttttcgtcgattatttcgttaaaatgttaggtttcggggttttgtatttttatcgtagatacggatcgaaagggtcgtagtaacgttttttcgtatttaggagcgttttttaggtttttgtattaatttcgttgttaagtttttgttcggcggcggttcggttggaggaggtgttttcgggaggcggggcgcggcgggattttttcgcgttcgcgttttaatcgttgttttttacgtaattttaaacggttttcgggcgaacggttcgcgcgcgttaaggtcgtcgagatttttaggggttgtcgtggtttcgcggatgtgggggtttgggcggcggcgtttcgatttagttagcggacgggtcggggggggaacgggaggttcggggggcgtttacgggggtgttttcgggggttttcggaagcgtcggcggaggttttcgtcggtttgaaaatcgcgcgcgttcgcggttagtttgggtaggggtaagcgtagttaatgggaagggtcggaggtatgtatagttaatgggaagggtcggggtattaaagttaatgggaagggtcgggagtcggcgcgggagatttaaaggttgttggagtgaggggtcgttcgtgtattttgttttagtcgttttgttttggttgttcgttttgtttcgttgcgtttttattatgtttttttttcgtgtttcgttcgcgtttattacggattcgtagtagttgtagttttcgtcgttgaaggggtttagtttggtcgataaggagaatacggtgagttcgcggggagggtttgcgtaggggagggaggtagggaaagcgaaggttttttatttatacgcgttttttcgtagtcgtcggttgagcggattttttttggttagtaagatcgtagaggatttttaggagtttaggagttttgagtgtcggttggtagagggtttaggtag

SEQ ID NO: 170 - DNA, 1448 bp, Artificial Sequence
  chemically treated genomic DNA (Homo sapiens)
ttatttggattttttgttagtcggtatttaggatttttgggtttttgaagattttttgcggttttgttggttaggaggggttcgtttagtcggcggttgcggggagacgcgtgtgagtgaggagttttcgttttttttgttttttttttttgcgtaggtttttttcgcgggtttatcgtgttttttttgtcgattaagttgagtttttttagcggcgagagttgtagttgttgcgggttcgtgatgggcgcgagcgggatacggagggagagtatagtggaggcgtagcgaagtagagcgagtagttaggataggacggttgggatagggtgtacgggcgattttttattttagtagtttttaaatttttcgcgtcggttttcggttttttttattggttttggtgtttcggttttttttattggttgtgtatgttttcgattttttttattggttgcgtttgtttttatttaggttggtcgcgggcgcgcgcgatttttaagtcgacgggagttttcgtcggcgttttcggagattttcggggatattttcgtggacgtttttcggatttttcgtttttttttcggttcgttcgttggttgggtcggggcgtcgtcgtttaggtttttatattcgcgggattacggtagtttttgagggtttcggcggttttggcgcgcgcgggtcgttcgttcgggaatcgtttaggattgcgtgaggagtagcgattggagcgcgggcgcgagaggatttcgtcgcgtttcgtttttcgaaagtattttttttagtcgggtcgtcgtcgggtaggggtttagtaacgaggttggtgtaaaggtttggaaaacgtttttgggtgcgggggagcgttgttgcgattttttcgattcgtgtttgcggtgggggtgtaaggtttcgaggtttgatattttggcggggtggtcggcgaggattttatagtttaaaagttaggtcgttgagtttcgtggttcgttttgttgggataagcgattaggttttttatagattcggtgttttcgtgagtaaaatgggattcgtaatcgcgtggattgttaatgcggtgaggagagcgttcgttgagatgatttatgtaaaatgtgtagttttttgtaaatttttaaattacggtatatggcgagaaggtttttggtgtagttttttatagaaattttgttttttgttagatttttgatttttattgttatttttgttttaagaattgtaaattgtggttgggcgcggtttacgtttgtaattttagtattttgggaggttacggtaggaggattgtttgaggttaggagttggagatattttgggtaatatagtgagatttcgtttttgttattaaaaagagaagaaaaaaagaaaaagaaaaagtggttgtcgttttattataagaaggattttttttattgtttgatggtgtt

SEQ ID NO: 171 - DNA, 1186 bp, Artificial Sequence
  chemically treated genomic DNA (Homo sapiens)
gatcgcgttattgtattttagtttgggtgagagagcgagattttgttttaaaaaaaaaaaaaaaagatcgttagggtttaaataaaaaatttcggaaaagttttggcggttttttttttttttttttttttttttttttgggatagttttgttttgtcgtttaggttggagtataatggtcggattttggtttattgtaatttttgttttttaggtttaagtaatttttttgttttagttttttaagtagttattacgtttagttaatttttgtatttttagtagagacgggggttttattatgttgtttaggttggttttgaatttttgattttaggtgatttattcgtttcggttttttaaagtattaggattataggcgtgagttatcgcgtttagcgttttggcggtttttaattaagtagaaaagttgtattatattatttgtttcggttgttttagtgagaacgaagaaatggaaatgtaaattttttattagttgtaggaaatagattttaaatagtagttttgttgataagatcgtaggaaaacgtgggaattgtgttgttggtttagagaaggcgcggtcgattagacggtttttaaagggcgtagttttttttagttatcgtatttgtatttaggttttcgggttttttaagatttttagttgtggttttgggtttcgttttgtgttatattcgtggtttttgcgtttttttttggcgtacgttttttagagcgggggtcgtcgcgatttcgtcgagtaggaagaggcggagcgcgggacggtcgcgggaaaaggcgcgcggaaggggttttgttatcgcgttatttggtttgttttcgtttcgtcgcgttatttggtttgttttcgtttcgtcgcgttatttcgtttgttttcgtttttcgttcgtcgcgttatgtttgtggtcggttcggagttgtcgcgtcggtttttgtttttcgtcgtataggagcgggacgtcgagtcgcgttcgtcgtacggggagttgtagtatttggggtagatttaatatatttttcgttgcggcgttaggaaggacgatcgtacgggtatcggtattttgtcggtattcggtatgtaggcgcgttatagtttgagaggtgacgtcgcgggtttttgcgggacgggtggcgggaaggagggaggcgcggttgggga

SEQ ID NO: 172 - DNA, 1186 bp, Artificial Sequence
  chemically treated genomic DNA (Homo sapiens)
tttttagtcgcgtttttttttttttcgttattcgtttcgtaggggttcgcggcgttattttttaggttgtagcgcgtttgtatgtcgaatatcgatagggtgtcggtgttcgtgcggtcgttttttttgacgtcgtagcggaggatgtgttggatttgttttaggtattgtagtttttcgtgcggcggacgcggttcggcgtttcgtttttgtgcggcggggggtaagggtcggcgcggtagtttcgagtcggttataggtatggcgcggcgggcgggggacggaggtaggcgaagtggcgcggcgggacggaggtaggttaagtggcgcggcgggacggaggtaggttaagtggcgcggtggtaggatttttttcgcgcgttttttttcgcggtcgtttcgcgtttcgtttttttttgttcggcggggtcgcggcggttttcgttttagagagcgtgcgttagggggaaacgtaggagttacgggtgtggtatagaacggagtttagggttatagttgagagttttaggaaattcgggaatttggatgtaggtgcggtggttgggaaggattgcgttttttgggaatcgtttggtcgatcgcgttttttttaagttagtagtatagtttttacgtttttttgcggttttgttaataaaattgttgtttgagatttgttttttataattaataagggatttgtatttttattttttcgtttttattgaagtaatcgaagtaagtggtataatgtagtttttttatttgattaaaaatcgttagggcgttggacgcggtggtttacgtttgtaattttagtattttggggggtcgaggcgggtggattatttgaggttaggagtttaagattagtttggataatatggtgaaattttcgtttttattaaaagtataaaaattagttgggcgtggtggttatttgggaggttgaggtagaagaattgtttgaatttgggaggtagaggttgtagtgagttaagattcgattattgtattttagtttgggcgatagagtaagattgttttaaaaaaaaaaaaaaaaaaaaaaaaaaaagatcgttagggttttttcgaggttttttgtttgagttttggcggttttttttttttttttttgagatagagtttcgtttttttatttaggttggagtgtagtggcgcgatt

SEQ ID NO: 173 - DNA, 9728 bp, Artificial Sequence
  chemically treated genomic DNA (Homo sapiens)
taaatatgaagattgaaaaaaattaaatatattttttataatgagattttgtttagagaatagtagtgattaaagtgtaaattgttggaaaatatggatatatgtatatttgtatatgtatatagtgtataatatgtatgtatatgttattgtttatatgtagaaatttatttatttgtagatagtttaggtgggttaatgtttttaatggaaaattatttagggttatttaaaattattagggttaatttgtggagacgaattttatttattttggaattaatttgttgttttttgatatttataaagttaaattaataaagtgtgaaatataaaggggttattatttagtttattttgtttatttggatttataattatttttatatttgaattattaatagttgatttgtaaattgtattggtattttttggttttgagtgatttttgttttttttaagttttttgagaatttggagtgggttttattggttatttagataaagggttttatttataagtggataggtttttttatagggattatcgtatatatatatataagtatatatttttattaggtttgtaataattgatttaaaattattttatagtattgataaatagttttatatttttaaggtgtagaagaattttatagttttaattattttagtgttttgttggtttgttttaagtgtattttttgggtttttggttattttattatttttaaatttttttgttgttgtttattttgtatgtatataatgtcgttttgtaaaggtaggttgtaaatattttatttgtaagttaaaattatttatgtgtaatgttgtaaagtgatgatttgttgttttgttattgttatagtaaatgttataagttatggatgaaattttaaaatgtatattttatatgttatgtatttttataaatatattatattaaagatattatatggttgtttttttttttttaattaaatttttgtttaaagaaaagagtaatttttttttttttttaaatatatgaaagatttagaaaaggtaaaaatattataggattattataatatgtttggtttaggattttagagagaaagtaataattttgtgttttagagtattttaaggtatttatttaaaaatgttaaggaaattttagagttaggtgtggtggttagtatttgtaaattttaatattttgaaaggttaaagtggaaggattttttgagtttaggagtttgatattagtttggataaaataaggagatatttacgtttttttaattttttatatattaaaaattgttttaaaaatattaattgagtgtgttggtgtatgtttgtgattttatttatttgggaggttgaggtggaagtattatttgaattcgggaggtagaagttatagtgagttgtgattatgttattttattttagtttgggtaataaagtgagattagattttattttaaaaaaaaaaaaaaaaaaaaaaaaaaaaaaaaaaaaaagtttcgggttgttgttaattttatattggtattttaggtgataatgttgttagattgtttggagggtattttgggttggattttataagtttatatattttggtgtggattttagtaatttgggttagtttatatagatatgattaggttttgaaagtttaaatgtgttatttacgtgtaaatgaggttgatttatggtatattgttaattagttagagtgttaaagtgttttgattagtttattttgttaagaaaataaaaatatgttttaatatttggtttttattttattaagattttattgtatttatttgtaatgagaaatatttgttaaaagtatgggttttttatattggtttattagtataattttttgagaaaatatagataataaagaatattagaaatgaaattagaattaggtttatgagttaaaattataagttttttatgggttttttttttatttagaatttgtatgtattttagtatttatatagtttatgaagtttatttgtaattaatattttatttaattttaataaatttttatgaagtaagttattttatttggattagagaaaattgagttatagaatttaggtgattgtttaaggttattgagatatttattggaagataattttttttttttttttggtatagggttttattttgttatttaggttggattgtagtggtatgattatagtttattgtggttttaattttttaggtttaagtgatatttttgttttagtttttttagtagttgggattataagtgtgtgttatgatgtttggttaattttttttattttttgaagagatagagttttattatgttatttaggttggttttaaatttttgggttttttatttttgttttttaaagtgttgggattgtaggtatgagttattgatttggttttagaatataatttaaaataaatgtgtatgtgtgtgttttagtgtttttgtgtgtgtatagtgtaggttaaataataataaataattaaataatagtattttagtttatatttttttgaaggggagtggtttagaggaattattaatatagttatggaatattagtaaaagttttaatataaatgataattagaattttataagtttagtttaaaatagatattagagtagaatatagaagggatttagtaagtaatatagagttaggtttatgaaaaggtttagattgaattattgtatgaaattttatatttatggaaattttttagggtaaatatttaaaatagtaagattaaatattggttaaagttaagattttttatttagtttaagtaaatgaaatggagaatataaaatgaattggtataatttatgtttttttgtttttttttttgttgttgttgttgtttgtttgtttgtttgttgttgttgagatagagtttttgttgtttaggttggagtgtagtggtatgattttggtttattgtaatttttattttttcggggtttaagtaatttttttgttttagttttttaagtagttgggattataggtatgtgttattatgttcggttaatttttgtattttttggtagagacggggttttattatgttgattgggttggtttcgaatttttaattttaggtgatttatttttttcggttttttaaagtattgggattataggtatgagttattatatttagttttattaattttttattaagtgtttttgagtgaattattttattgaatttttatagtgatttttggagaaagttaatattattatttttattttttttttttttttttgagcgtagtttggttttttcgtttagtttggagtgtagtgatgcgatttcggtttattgtaagttttgtttttcgggtttatattatttttttgttttagtttttcgagtagttgggattataggcgtttattattatgtttagttaatttttttgtatttttagtagagacggggttttattatgttagttaagatggttttgattttttgatttcgtgattcgttcgttttagttttttaaagtgttgggattataggcgtgagttatcgcgttcggtttttttattttatttttgagaaaattgagatttatatagtttaaaatgtattgttaaagattatttagttagtaagtagaatgggattaaaatttaaatgttttggtttgaaattttatgttttttgtagtgtattatatagttatgttttatttgttttttttttttaaaaaagtatttgttatagttgatatatgatatcgtatatatttattgggtatatagtgttattttaatatatataatgtatagtgattaaattagagtaatttatatattttttattttaaatatttattttttttttgtgttgggaatatttaaacgttttttttttagttattttaaaatatatagtaaattattattgattatagttattttatagtgtaatggaatattaggatttattttttttatttagttgtaatttgtgttttttaattattttttattttttttagtttttagtgattattattttattttttagttttatgagattaatttttttagtttttgtatatgagcgagaatatttggtatttatttttttgtttttggtttgttttattaatataatgttttttaggtttatttattttgttgtaaatgataaggttttattttttatgtgaatttaagggttattttttttaagttagaataaagtattgttttatatatataatggagaagggatttatttgtatagattatttattgattatttttttaagggatttatttgtaaagattaaatatgtttggatttttagattgtttagtaatattatttttttggataattttgatattaattaattaatcgttttttaattttttttttttttttttttattttttttatatttattatttaagtatttgaggtacgttaaaggaaataaaaaagtatttttttaggaagtagagtatagataaaagaggtaatgaatattgtaatgatttaagtgttatatatttttatgtgtaaattgttatggaattgttacgtattagatgttatgaagttaataaaagaattgagtaaaggtttttgtttttgataatttatattttatttggagaaatatggggggtaaattttggttaataattagtaaatataatatgttaggttaaggagtagagataattaagagaattagtcgagaaggtattggttattaaaaaatggataggatttatgtaaatttttatgaaaggtgggattttatgattttatagttaatttagttgttttgggttttgaattttagcgattttatttagaagaaattaggagaagtataaattggcgttaggttcgttattatttatttgatttttgagttcggggaaatttacgggtgtagtaagtcgggaaagttgtagacgaggtaggcggaagaggcgggatttcgcgggtgacgttatcggggcgtcggaggttcggggcgtttgggaatttgaagtaaataggtagcgcgcgataatggcggtcgttcgtgtagttttggggttattggtgacgggtttgtacgacgtgtaggtttttaagtttggggatttcgtgttgaagagcgggttttttttttttatttatatcgatttgcggggtatcgtgtttcgatcgcgttttttgagttaggtgttggtttaggaagggaaaggatagggtttggtggcgggaaggaggataaggaaatggaagagggtgataggagttgggtcgtgagtgagagtaaaagagttaagtaggtagatcgattttatttttggtttggggagtaagtatgagaagtatagaggttaggggttgggtttttcgagagtcgtttgtttttttatttatacgtttagatacgtgttttgtaaaagtcgggaaatttagtttggaacgttttttggtattgaagtatatttgaatgaattttgtatatttaattttttaagaaaattagatttgcggtcgggcgtggtgttttatgagagtaatattagtattttgggatgtttaagtgggtagattatttgagttttaggagttcgagattagtttgggtaatatgacgagatttcgtttttataaaaaattagttgggtgtggtggcgtacgtttgggacgttgaggtgggaggattatttgagtttgggaggttaaggttgtaatgagttgttattgcgttattgtattttagtttgggcgataagtgagattttgtttttaaaaaataaataaatagatcgggaaaacgtgggtaggtagagaatttagtagttgggaaattattggtgagaaaaggaaaatagaataattagaattttgtgatgtatataaaatttattagagtttagagagattttaattatatttttttatgtagtttcgggataattatttaaaggaattttgtttttgattagttgttttttttattattttaatgtatttggaatgtgtgatataaagaataatgtatagttaattaatcgtttgtgttattattttatttatttattttttagatgggattttttttacgttatttaggttggagtgtagttttgtgattatagtttattgtagtttggaatttttgggtttaagagatttttttgtttcgggtgagtataggggtttatgtttgtagttttaattttgggaggttttttttgggaggttgaggcgggtggattatttaaggtttggagttcgagattagtttggttaatatggtgaaattttgtttttattgaaaatgtaaaaattagttgggtatggtggtgtatatttgtaattttagttatttaggaggttgaggtagaagaattaggaggttgtagttagtcgaaattgagttattgtattttagtttgggtaatagagggagattgttttagaaaaaaaaaaaaaaaagagatttttttattttaatttttgagtagttggaattataggtatgtgttattatgtttattaaattaaaaattttttttttttgtagagaggaggttttattatattgtttaggttcgttttaaatttttggttttaaaagatttttttgttttggcggttttttaagtagttgggattataaatgtttggtgttattttcgggttattttttgttattttaatgtaaatttttggtgaatataggaattgtttttttttttgttttaaaaatttatttgtaattattgtaatcgaagtttatagttagggtaattatttatattaattttgttttagtttttttttgttaggtttatatttggaagggttgtttggaaaggggagttgaattttgtattgtgcggttagaagtaataattaagattagaaggtggatatattgggaaagtaggtttttagttaatataaggaaaatttttgtataaattagaggtttttaatatagtgttttttaattttgagtatatatgaattatttgggaattttgttaaaatgtagaatttatttttgtagttttgagattagatttgaggttgtgtatttttaataaagtgttagttgaaattgtagattatattgagtagagggtcgtaaatatgttttttaatatagtttgttattagttacgtgttattattgagtattatgaatttttaagtttaaatagttatatatggttagtggttattatattggattgtaaagatagagaatatttttattattgtagaaagttttattaagaagatatataagtttttttagtttatttaagggtttatgtttattagggattattttgtgtggttattgtaaaaagtattgaagataggttggattattaaggttgcggtattttggattattaattttttattatttagaattttgttatggtgtattttagtaatgtggagaattattaaggattttttagggaaaaattgatttattttaataagttagttgataaatgatagaaaaagttttttgataattagattatggtgtgtgtgtgtgtgtgtgtgtgtgtgtgtattttggtgattaattggggaggagtttaaaatatggagagatttgggtataataaaatttttttttatattttatgcgaatagaattttttagtatttatattttaaaaagtaatataatttatgttaaattttaattttttttaataagtgataataagtgatatttgattatagtattatatatatattagtgtatataaagtaattggagaggaaaggtagtattaatttattaaaaatgtattttttaaatttgtttttatttttttgttaaaatttgtaaattatgtttgaattaattatatgtttgttataatttaatgatatatagaagaatttttttttttaaaaagtataatttttatttttttttttttaagagaatagtttttttttagtttttaaggatttagttttttatatgggttttggtgagggttatgaggtagtatttataggtttaaattagattggggtatttggtttttgtgggatttataagatggattattgattgttttgttgtgaatggtataatttatattttaatgtagtttcgtatatagtttgggaagaatataggaggtaaagttgtttattgtagtaatgtttttgattgttgcggtttttattatgttttgtacgacgagttttttaatggttttttttttgggtatgtatcggatatagtatgtgttattattggttatagttttttttggtacgattattgttttttttttttttttgttattttggaagtaaggatttgagagagttatagaagaatttttgatatttagagatttatggttatgggaaatttttttttaattattattttaaattttagtttatatatatatagataagtatgatagagggattagtaaaagttttttaagtataattatatattattttagaataaaattttgtggatatagtggagtgaaaatatgagttggaaaaagatgtaaaaaattttaaattttttatagtttagtaattttacgttttgtttttttaaatggagatggtggatatttagttattagtatttgtattttaagtttattttttaaaaagagtgataaaatagttttaagataatatgttaatatttttagtattagaaattatattttttgtaatttaaaatagttatagtttttttttgtttgtttttttattttttagaagtattggtgtaaatttatgatttagtttataaagtaatttagtgattgtttgtttttttaaaaaaaaaatgaggtggttttgggtgggaatatgtattttaatattaaaatatgatgatttatgtggaaaaggagattataaaatagtaatttatataatagtttgtatttatgaaattttttaattgaaggttttttttaggatatataattaaaagatgataggtttagatatttagtttaatgggttattgaggaaattaggaagtcgggatcgtttttagtttttggggttaatattatgagtttttttagtatattttaggttgtttttagaatagattttgagtttggttgaatagatttatttttgtgtttttagatttatatttgtgtattgggtttatggagagggtaataaaaaggtatttgtttttttttttttaattaagtttgagatttatttttattagtttattattgttttttttgttacgttgttatatgtttatatattatttaaaatagttataataggttgggcgtagtggtttacgtttgtaattttagtattttgggaggtcgaggtaggtggattataaggttaagagtttgaggttagtttgattaatatagtgaaattttatttttattaaaaatataaaaaaattagttgggtgtagtggtgcgcgtttgtaattttagttttttgggaggttggggtaggagaattatttgaatttgggaggtagaggttgtagtgagtcgagatcgtattattgtattttagtttgggtaatagggcgagattttattttaaaaaataaaaaatataaaataaaataaaatagttataataaaatattgtttatgtgtttatttttttatagg

SEQ ID NO: 174 - DNA, 9728 bp, Artificial Sequence
  chemically treated genomic DNA (Homo sapiens)
tttgtaagaaaatgaatatataaataatgttttattgtaattattttattttattttatattttttattttttgagatggagtttcgttttgttgtttaggttggaatgtagtggtgcgatttcggtttattgtaatttttgttttttaggtttaagtgatttttttgttttagttttttaaggagttgagattataggcgcgtattattatatttagttaatttttttgtatttttagtagagatggggttttattatgttggttaggttggttttaaatttttggttttgtgatttatttgtttcggttttttaaagtgttgggattataggcgtgagttattgcgtttagtttattgtaattattttaaatagtgtataaatatgtaataacgtaatagaaaagatagtaataaattagtgggggtaagttttaaatttgattggagaaaaaaaaataaatgtttttttattattttttttataaatttagtatataaatataaatttaaaaatataagaatgaatttatttaattagatttagaatttgttttgaaggtaatttgagatgtgttggggaagtttatgatgttgattttaaagattaaggacgatttcgattttttggtttttttagtaatttattaggttgagtatttaaatttattattttttagttatatattttgaaagaagtttttaattaggaagttttataaatatagattattgtgtgaattgttattttataatttttttttttatataaattattatattttaatgttaggatatatatttttatttaagattattttattttttttttaaaaaagtaaatagttattgagttgttttgtgaattagattataggtttatattagtatttttaaagagtaaaaaaataaataaaaaaaaattatgattattttaagttgtagagaatgtaatttttagtattaaaaatattaatatattattttagaattgttttattattttttttaaggaataaatttggaatataaatgttagtgattggatatttattatttttatttaaaaaaataaaacgtgaaattgttggattatgaaaagtttaaaattttttatatttttttttaatttatatttttattttattgtgtttatagaattttattttaaagtaatatatgattatatttgaaaagtttttattgatttttttgttatatttgtttatatgtatgtaaattgaaatttaaaatggtaattaaaaaaaaattttttatgattataagtttttagatgttaagaatttttttgtagtttttttaggtttttatttttaagatgataaagaaaagaaaggaataatgatcgtgttaaaaagggttgtggttagtagtggtatatattatgttcgatgtatgtttaaggaaaagattattaagaagttcgtcgtgtaaaatatagtagaggtcgtagtagttagggatattattgtagtgagtaattttgttttttatgttttttttaagttgtatgcgaagttatattaaggtgtgagttgtgttatttatagtaaggtagttagtaatttattttgtgaattttataaggattaaatattttaatttgatttaaatttgtgggtgttgttttatgatttttattaaagtttatgtaaggagttgaatttttaaggattgaagagaaattatttttttgaggaaaagaaaatggaaattgtattttttaaagaagagaatttttttgtatattattaaattataataagtatatgattaatttaaatatgatttgtaaattttgatagagagataaaaatagatttggaaaatgtatttttagtgagttaatgttattttttttttttaattattttatgtatattaatgtgtatatagtattatagttaaatattatttattattatttattaagggaagttagagtttagtataaattatattgttttttggggtgtaaatattgagaaattttattcgtataagatgtgaaaagaagttttgttatatttaagtttttttatgttttgaatttttttttagttaattattaaaatatatatatatatatatatatatatatatattatgatttagttattaaaaaattttttttgttatttattagttggtttattaaaataaattaatttttttttagaaaatttttagtaattttttatattgttaagatatattatagtaagattttggatggtgagaagttaatggtttaaagtatcgtaattttaatagtttaatttatttttaatattttttataataattatataaagtggtttttagtgaatataaatttttaagtgggttgaggaaatttatatgtttttttgatagaattttttgtaatgatggaaatgttttttatttttgtagtttaatatgatagttattggttatatatgattatttaaatttaaaaatttataatgtttaatagtaatacgtggttagtagtaaattgtattggaaagtatatttacggttttttatttagtgtggtttgtagttttagttggtattttgttagaaatgtataattttaggtttagttttagagttatagaaatggattttgtattttaataaaatttttaggtaatttatatatatttaaagttgagaagtattgtattagaaatttttaatttgtataaaaattttttttatattgattaaaaatttgtttttttaatatgtttattttttagttttaattattgtttttggtcgtatagtgtaaaatttaatttttttttttaaatagtttttttaagtgtggatttaataggaagaggttgaggtaaaattaatatgagtagttgttttgattataggtttcgattatagtagttataagtggatttttaaagtaaaagaaggggtagtttttatatttattaagaatttgtattgaaataataggaggtagttcgggggtggtattaggtatttgtagttttagttatttgggaagtcgttaaggtaagaggattttttgaggttaggagtttgagacgagtttgggtagtatggtgagattttttttttataaaaaaaaaaaatttttaatttggtgggtatgatggtatatgtttgtagttttagttatttagaggttgaggtaagaggattttttttttttttttttttttgagatagtttttttttgttgtttaggttggagtgtagtggtttaatttcggttaattgtaattttttgatttttttgttttagttttttgagtagttgggattataggtgtgtattattatgtttagttaatttttgtatttttagtagagatagggttttattatgttggttaggttggtttcgaattttagattttaagtgatttattcgttttagttttttaaagaaagttttttaaagttgggattataggtatgagtttttgtgtttattcgaggtaagaagattttttaagtttaggagttttaggttgtagtgagttatgattatagagttgtattttagtttgggtgacgtaagagagattttatttaaaaaataaataaataaaataataatataagcgattgattagttatatattgttttttgtattatatattttaggtatattaagataatgggagaggtagttagttagggataaaatttttttaaataattgtttcggggttgtataggggagtatggttgaagtttttttgggttttgataaattttgtatatattatagagttttggttgttttatttttttttttttattagtaattttttagttattgaattttttgtttatttacgttttttcggtttatttgtttgttttttgagggtagggttttatttgtcgtttaggttggagtgtagtggcgtaatgatagtttattgtagttttgattttttaggtttaggtgatttttttattttagcgttttaggcgtgcgttattatatttagttaattttttgtagagacggggtttcgttatgttgtttaggttggtttcgaatttttggggtttaggtgatttgtttatttaggtattttaaagtgttggtattatttttatgaggtattacgttcggtcgtaagtttaatttttttaaagagttaaatatatagaatttatttaagtgtgttttagtgttagaaagcgttttaaattgggtttttcgatttttgtaaaatacgtgtttaagcgtgtgggtgaaagaatagacgattttcgaggagtttaatttttggtttttgtgttttttatgtttattttttaaattaagagtagggtcggtttgtttgtttggtttttttgtttttatttacggtttaatttttgttatttttttttatttttttgttttttttttcgttattaagttttgttttttttttttttaggttagtatttgatttagaagacgcggtcgagatacgatgtttcgtagatcgatgtagatgggggaggaaagttcgttttttagtacgaagtttttaaatttgaaagtttgtacgtcgtatagattcgttattaatggttttaaagttgtacgagcgatcgttattgtcgcgcgttgtttgtttgttttaaatttttaggcgtttcgggttttcggcgtttcgatgacgttattcgcgaagtttcgtttttttcgtttgtttcgtttgtagttttttcggtttgttgtattcgtgggttttttcgggtttaagggttaggtggatggtagcgaatttagcgttagtttgtgttttttttggttttttttggatggggtcgttggggtttaaagtttagaatagttagattgattgtaggattatgaagttttattttttatgagagtttgtataaattttgtttattttttaatagttaatgttttttcgattagtttttttaattatttttattttttggtttaatatgttatatttgttagttattagttaagatttattttttatgtttttttaaatagaatataagttattaaagatagggatttttatttaatttttttattaattttatagtatttagtacgtgatagttttatagtagtttgtatataggaatatatagtatttagattattatagtatttattattttttttgtttgtattttgttttttggaggagtatttttttattttttttggcgtattttaaatgtttaggtaataggtgtagaaaaggtaagggagggaaggaggagagttagaagacggttaattgattggtattagggttatttaggaggataatattgttagataatttgaaaatttaaatatatttggtttttataaataaattttttaaagaaataattaataaataatttgtataaataaattttttttttattgtgtatataaggtaatattttattttagtttaaggaaaataatttttaaatttatataaagaatgaaattttgttatttgtagtaaggtggatgaatttgaaggatattatgttagtgaaataagttaggaataggaagataaatattaaatgttttcgtttatatgtagaagttaaaaaagttgattttatggagttagagaataaaatagtaattattagaggttgggaagggtagggggtggttaaaggatataaattatagttagataggaggaataagttttagtgttttattgtattgtagggtgattgtagttaataataatttattatatattttaaaatagttagaagaggggcgtttgaatgtttttaatataaagaaaggataaatatttaaggtgaggaatatatgaattattttgatttgattattgtatattgtgtgtattgaaatagtattatgtatttaataaatgtgtacgatattatgtgttaattataataaatatttttttaaaaaagaggaatagataaggtatagttgtatagtgtattataaagaatatgaagttttaaattaaaatatttggattttagttttattttatttattggttgagtgatttttggtaatgtattttgagttatatgagttttaatttttttaaaaatagaatgaagaagtcgggcgcggtggtttacgtttgtaattttagtattttgggaggttgaggcgggcggattacgaggttaggagattaagattattttggttaatatggtgaaatttcgtttttattaaaaatataaaaaaattagttgggtatggtggtaggcgtttgtagttttagttattcgggaggttgaggtaggagaatggtgtgaattcgggaggtaaagtttgtagtgagtcgagatcgtattattgtattttaggttgggcgaaagagttagattgcgtttaaaaaaaaaaaaaaagaatgaagataataatattaattttttttaaaaattattatgaagatttaataagatagtttatttaaaaatatttgataaaaagttggtagagttgagtgtggtggtttatgtttgtaattttagtattttgggaggtcgagggaagtggattatttgaggttgagagttcgagattagtttagttaatatgatgaaatttcgtttttattaaaaaatataaaaattagtcgggtatagtagtatatgtttatagttttagttatttgggaggttgaggtaggagaattgtttgaatttcgagggggtggaggttgtagtgagttaagattatgttattatattttagtttgggtaatagagattttgttttaataataataaataaataaataaataataataataataaaaaaaaaagtagaggaatatagattgtattaatttattttgtgttttttattttatttatttaggttgggtaaaggattttggttttaattaatatttagttttattattttaggtatttattttaaagagtttttatgaatgtaaaattttatgtagtagtttaatttgagtttttttatggatttagttttatattgtttattgaattttttttgtattttattttgatatttattttagattgagtttgtggggttttgattattatttgtattagggtttttgttaatattttataattatattggtgatttttttgaattatttttttttaaaaaaatataggttgaggtattgttatttaattatttattattgtttgatttatattatatatatatagagatattgaaatatatatatatatatttattttaagttatgttttagggttaggttagtggtttatgtttgtaattttagtattttgggaggtagagatgggaagtttaggagtttgagattagtttgggtaatatgatgagattttgtttttttaaaaaataaaaaaaattagttagatattatggtatatatttgtggttttagttattggggaggttgaggtaggaatattatttgagtttgggaggttgaggttatagtgaattgtgattatgttattgtagtttagtttgagtgatagagtgagattttgtgttaaaaaaaaaaaaaaagttattttttagtgaatgttttagtgattttgaataattatttagattttgtgatttagttttttttaatttaagtaaaataatttattttataagaatttgttgggattaaatgaaatattaattataaatgggttttataagttatataggtgttaaaatatatataaattttagataaaaaaaaagtttataaggggtttatgattttaatttataaatttgattttgattttatttttaatattttttattatttatatttttttaggagattgtgttgatgagttaatgtgaagagtttatgtttttgataagtgttttttattataaataaatgtaataaaattttaatgaaatagaagttaaatgttaaaatatgtttttgtttttttggtaaaataagttaattaaaatattttaatattttggttaattgatagtatattatgaattagttttatttgtacgtgggtggtatatttaaatttttaaagtttgattatatttgtataggttaatttaaattgttggagtttatattagaatgtataaatttgtgagatttagtttaaaatattttttagatagtttaataatattattatttgaaatattagtatgaaattaataataattcgaggtttttttttttttttttttttttttttttttttttttttgagatagggtttggttttattttgttgtttaggttagagtgaggtagtataattatagtttattgtagtttttatttttcgggtttagatgatgtttttattttagttttttaagtagatgggattataggtatgtattaatatatttagttaatatttttaaaataatttttaatatgtggggggttggggggacgtgggtgtttttttattttgtttaggttggtgttaaatttttgggtttaagagatttttttattttggttttttaaagtgttaggatttataggtgttagttattatatttggttttgaggtttttttggtatttttgggtaaatgttttagaatattttagggtataaaattgttgttttttttttaaaattttgggttaaatatgttgtaataattttgtgatatttttattttttttaagttttttatatatttggagaaagaaaaaaattatttttttttttgaataaaggtttaattaggaaaaaagagataattatatagtatttttagtatagtatatttataggaatgtataatatgtgagatgtatattttgaagttttatttataatttataatatttattgtagtagtaataagatagtaggttattattttataatattatatatgagtgattttgatttataaataaaatatttataatttatttttataaaacgatattgtgtgtatataaaatgaataatagtagaaaaatttaaaaataataaaataattaaaaatttagaagatatatttaaggtagattagtaagatattgaaataattaaggttgtggaatttttttgtattttgaaaatatagagttatttattaatattgtggagtgattttaaattaattgttataagtttgatggaagtatgtatttatatgtatatgtgcgatggtttttatggggaaatttgtttatttatgaataaggttttttgtttgaatggttagtgaagtttattttaaatttttaaaagatttgaggggggtaggggttatttaaaattaagagatgttaatatagtttgtaaattaattattaatagtttaaatgtaaagatagttataagtttagataaatagaataaattaaatgatggtttttttatgttttatattttgttagtttggttttgtggatgttaaaagatagtaaattaattttagaatgagtagaattcgtttttataaattagttttaatggttttgaatggttttaaatggttttttattagaaatattgatttatttgggttgtttgtaaatggatagatttttgtatatgagtaataatatatatatatatattatatattatatatatgtatagatgtatatatatttatattttttaatagtttgtattttgattattattgttttttgaataggattttattatgaagagtatgtttagttttttttagtttttatatttg

SEQ ID NO: 175 - DNA, 20 bp, Artificial Sequence
  SOD1 primer
aggggaagaaaaggtaagtt

SEQ ID NO: 176 - DNA, 20 bp, Artificial Sequence
  SOD1 primer
cccactctaaccccaaacca

SEQ ID NO: 177 - DNA, 18 bp, Artificial Sequence
  SOD1 detection oligomer
ttttggggcgttttaatt

SEQ ID NO: 178 - DNA, 18 bp, Artificial Sequence
  SOD1 detection oligomer
ttttggggtgttttaatt
